(19) United States
(12) Patent Application Publication
(10) Pub. No.: US 2014/0155462 A1
(43) Pub. Date: Jun. 5, 2014

(54) METHODS AND COMPOSITIONS FOR THE SPECIFIC INHIBITIONS OF EGFR BY DOUBLE-STRANDED RNA

(71) Applicants: Bob D. Brown, Millington, NJ (US); Henryk T. Dudek, Wellesley, MA (US)

(72) Inventors: Bob D. Brown, Millington, NJ (US); Henryk T. Dudek, Wellesley, MA (US)

(73) Assignee: DICERNA PHARMACEUTICALS, INC., Watertown, MA (US)

(21) Appl. No.: 14/113,107

(22) PCT Filed: Apr. 20, 2012
(86) PCT No.: PCT/US12/34377

§ 371 Date: Feb. 18, 2014

Related U.S. Application Data
(60) Provisional application No. 61/478,093, filed on Apr. 22, 2011.

(51) Int. Cl. C12N 15/113

(52) U.S. Cl. CPC C12N 15/1138
USPC 514/44 A; 536/24.5; 435/375

(57) ABSTRACT

This invention relates to compounds, compositions, and methods useful for reducing EGFR target RNA and protein levels via use of dsRNAs, e.g., Dicer substrate siRNA (DsiRNA) agents.

### CROSS-REFERENCE TO RELATED APPLICATIONS

[0001] The present application claims priority to, and the benefit under 35 U.S.C. §119(e) of, U.S. provisional patent application No. 61/478,093, filed Apr. 22, 2011, entitled “Methods and Compositions for the Specific Inhibition of EGFR by Double-Stranded RNA”. The entire teachings of this application are incorporated herein by reference.

### FIELD OF THE INVENTION

[0002] The present invention relates to compounds, compositions, and methods for the study, diagnosis, and treatment of traits, diseases and conditions that respond to the modulation of EGFR gene expression and/or activity.

### BACKGROUND OF THE INVENTION

[0003] Cell proliferation and programmed cell death are critical to growth, development and maintenance of an organism. In proliferative diseases such as cancer, the processes of cell proliferation and/or programmed cell death are often perturbed. For example, a cancer cell may have unregulated cell division via overexpression of a positive regulator of the cell cycle or via loss of a negative regulator of the cell cycle, perhaps by mutation. Alternatively, a cancer cell may have lost the ability to undergo programmed cell death through the overexpression of a negative regulator of apoptosis. Accordingly, there is a need to develop new therapeutic agents that will target cancer-associated genes (e.g., oncogenes) in a manner capable of modulating such targets and, ideally, restoring the processes of checkpoint control and programmed cell death to cancerous cells.

[0004] The EGFR gene that encodes for the epidermal growth factor receptor (EGFR; ErbB-1; HER1 in humans) is the cell-surface receptor for members of the epidermal growth factor family (EGF-family) of extracellular protein ligands (Herbst R S. Int. J. Radiat. Oncol. Biol. Phys. 59 (2 Suppl): 21-6). The epidermal growth factor receptor is a member of the ErbB family of receptors, a subfamily of four closely related receptor tyrosine kinases: EGFR (ErbB-1), HER2/c-neu (ErbB-2), Her 3 (ErbB-3) and Her 4 (ErbB-4). Mutations affecting EGFR expression or activity have been associated with cancer (Zhang et al. J. Clin. Invest. 117: 2051-8). EGFR is a glycoprotein with a molecular weight of 170,000 to 180,000 and is an intrinsic tyrosine-specific protein kinase, which is stimulated upon epidermal growth factor (EGF) binding. The known downstream effectors of EGFR include PI3-K, RAS-RAF-MAPK P44/P42, and protein kinase C signaling pathways. EGFR signaling is involved in cell growth, angiogenesis, DNA repair, and autocrine growth regulation in a wide spectrum of human cancer cells (Wakeling A E., Curr Opin Pharmacol 2002, 2: 382-387). Therefore, it has emerged as a target for the development of new cancer therapies. Recently, a monoclonal antibody against EGFR called cetuximab has been developed, which has shown excellent clinical effects for the treatment of lung, colorectal, and head and neck cancers in clinical trials in humans (e.g., Shin et al., Clin Cancer Res, 2001, 7:1204-1213). Specifically, cetuximab is indicated for treatment of subjects/patients with the following forms of cancer: EGFR expressing, KRAS wild-type metastatic colorectal cancer in combination with chemotherapy or as a single agent in patients who have failed in oxaliplatin- or irinotecan-based therapy and who are intolerant to irinotecan; squamous cell carcinoma of the head and neck (SCCHN) in combination with radiation therapy, or as a single agent in patients who have had prior platinum-based therapy (two studies have evaluated the benefits of cetuximab in patients with SCCHN in both the locally advanced and the recurrent and/or metastatic settings, with the latter trial being a Phase III trial that demonstrated a survival benefit in first-line recurrent and/or metastatic disease). Other small chemical inhibitors of EGFR, such as ZD-1839 have also been developed and demonstrated antitumor effects in vitro and in vivo (Shawver L K, et al., Cancer Cell 2002, 1:117-123). However, clinical use of ZD-1839 in humans has not been very successful. (Baselga Eur J Cancer 2001, 37:S16-22).

[0005] Double-stranded RNA (dsRNA) agents possessing strand lengths of 25 to 35 nucleotides have been described as effective inhibitors of target gene expression in mammalian cells (Rossi et al., U.S. Patent Application Nos. 2005/0244858 and US 2005/0277610). dsRNA agents of such length are believed to be processed by the Dicer enzyme of the RNA interference (RNAi) pathway, leading such agents to be termed “Dicer substrate siRNA” (“DsiRNA”) agents. Additional modified structures of DsiRNA agents were previously described (Rossi et al., U.S. Patent Application No. 2007/0265220).

### BRIEF SUMMARY OF THE INVENTION

[0006] The present invention is directed to compositions that contain double stranded RNA (“dsRNA”), and methods for preparing them. The dsRNAs of the invention are capable of reducing the expression of a target EGFR gene in a cell, either in vitro or in a mammalian subject.

[0007] In one aspect, the invention provides an isolated double stranded nucleic acid (dsNA) having ribonucleotides and first and second nucleic acid strands and a duplex region of at least 25 base pairs, with the first strand of 25-34 nucleotides in length and the second strand of 26-35 nucleotides in length, where the second strand is sufficiently complementary to a target EGFR cDNA sequence of Table 13 along at least 15 nucleotides of the second oligonucleotide strand length to reduce EGFR target gene expression when the double stranded nucleic acid is introduced into a mammalian cell.

[0008] Another aspect of the invention provides an isolated double stranded nucleic acid (dsNA) having ribonucleotides and consisting of: (a) a sense region and an antisense region, where the sense region and the antisense region together form a duplex region consisting of 25-35 base pairs and the antisense region includes a sequence having at least 15 contiguous nucleotides that are complementary to a sequence of Table 17; and (b) from zero to two 3′ overhang regions, where each overhang region is six or fewer nucleotides in length.

[0009] In another aspect, the invention provides an isolated dsNA having ribonucleotides, consisting of: (a) a sense region and an antisense region, where the sense region and the antisense region together form a duplex region consisting of 25-35 base pairs and the antisense region includes a sequence having at least 19 contiguous nucleotides that are complementary to a sequence of Tables 17 and 18; and (b) from zero to two 3′ overhang regions, where each overhang region is six or fewer nucleotides in length.

[0010] In an additional aspect, the invention provides an isolated dsNA having ribonucleotides, consisting of: (a) a sense region and an antisense region, where the sense region and the antisense region together form a duplex region consisting of 25-35 base pairs and the antisense region includes a sequence that is the complement of a sequence of Tables 17-23; and (b) from zero to two 3′ overhang regions, where each overhang region is six or fewer nucleotides in length.

[0011] In a further aspect, the invention provides an isolated dsNA having ribonucleotides, consisting of: (a) a sense region and an antisense region, where the sense region and the antisense region together form a duplex region consisting of 25-35 base pairs and the antisense region includes a sequence that is the complement of a sequence of Tables 17-23; and (b) from zero to two 3′ overhang regions, where each overhang region is six or fewer nucleotides in length, and where, starting from the 5′ end (position 1) of a EGFR mRNA sequence of Tables 17-26 (position 1), mammalian Ago2 cleaves the mRNA at a site between positions 9 and 10 of the sequence.

[0012] Another aspect of the invention provides an isolated dsNA having first and second nucleic acid strands having ribonucleotides and a duplex region of at least 25 base pairs, where the first strand is 25-34 nucleotides in length and includes a 5′-terminus and a 3′-terminus and the second strand of the dsNA is 26-35 nucleotides in length and includes a 5′-terminus and a 3′-terminus and includes 1-5 single-stranded nucleotides at its 3′ terminus, where the second oligonucleotide strand is sufficiently complementary to a target EGFR mRNA sequence of Tables 17-26 or SEQ ID NOs: 2137-2396 along at least 19 nucleotides of the second oligonucleotide strand length to reduce EGFR target gene expression when the double stranded nucleic acid is introduced into a mammalian cell.

[0013] An additional aspect of the invention provides an isolated dsNA having first and second nucleic acid strands having ribonucleotides and a duplex region of at least 25 base pairs, where the first strand is 25-34 nucleotides in length and the second strand of the dsNA is 26-35 nucleotides in length and includes 1-5 single-stranded nucleotides at its 3′ terminus, where the 3′ terminus of the first oligonucleotide strand and the 5′ terminus of the second oligonucleotide strand form a blunt end, and the second oligonucleotide strand is sufficiently complementary to a target EGFR sequence of Tables 17-26 or SEQ ID NOs: 2137-2396 along at least 19 nucleotides of the second oligonucleotide strand length to reduce EGFR mRNA expression when the double stranded nucleic acid is introduced into a mammalian cell.

[0014] In another aspect, the invention provides an isolated double stranded ribonucleic acid (dsNA) having first and second nucleic acid strands, where the dsNA includes a blunt end, where each of the first and second oligonucleotide strands consists of the same number of nucleotide residues and is at most 35 nucleotides in length, where the ultimate and penultimate residues of the 3′ terminus of the first strand and the ultimate and penultimate residues of the 5′ terminus of the second strand form one or two mismatched based pairs, where the second oligonucleotide strand is sufficiently complementary to a target EGFR cDNA sequence of Table 13 along at least 15 nucleotides of the second oligonucleotide strand length to reduce EGFR target gene expression when the double stranded nucleic acid is introduced into a mammalian cell, where the dsNA reduces EGFR mRNA levels by at least 70% when assayed in vitro in a mammalian cell at an effective concentration in the environment of the cell of 1 nanomolar or less.

[0015] In one embodiment, the dsNA reduces EGFR mRNA levels by at least 80% when assayed in vitro in a mammalian cell at an effective concentration of 1 nanomolar or less in the environment of the cell. In another embodiment, the second strand is sufficiently complementary to a target EGFR cDNA sequence of Table 14 or, optionally, Table 15 along at least 15 nucleotides of the second strand length to reduce EGFR target gene expression when the double stranded nucleic acid is introduced into a mammalian cell. In an additional embodiment, the second strand is complementary to a target EGFR cDNA sequence of GenBank Accession Nos. NM_{—}005228.3 and NM_{—}207655.2 along at most 27 nucleotides of the second strand length.

[0016] In certain embodiments, the invention provides for an isolated dsNA wherein the first strand is 26-35 nucleotides in length, 27-35 nucleotides in length, 28-35 nucleotides in length, 29-35 nucleotides in length, 30-35 nucleotides in length, 31-35 nucleotides in length, 33-35 nucleotides in length, 34-35 nucleotides in length, 17-35 nucleotides in length, 19-35 nucleotides in length, 21-35 nucleotides in length, 23-35 nucleotides in length, 17-33 nucleotides in length, 17-31 nucleotides in length, 17-29 nucleotides in length, 17-27 nucleotides in length, 21-35 nucleotides in length or 19-33 nucleotides in length.

[0017] In related embodiments, the invention provides for an isolated dsNA wherein the second strand is 26-35 nucleotides in length, 27-35 nucleotides in length, 28-35 nucleotides in length, 29-35 nucleotides in length, 30-35 nucleotides in length, 31-35 nucleotides in length, 33-35 nucleotides in length, 34-35 nucleotides in length, 21-35 nucleotides in length, 23-35 nucleotides in length, 25-35 nucleotides in length, 27-35 nucleotides in length, 19-33 nucleotides in length, 19-31 nucleotides in length, 19-29 nucleotides in length, 19-27 nucleotides in length or 19-25 nucleotides in length.

[0018] In certain embodiments, the invention provides for an isolated dsNA, wherein each of said first and said second strands has a length which is at least 27 nucleotides, at least 28 nucleotides, at least 29 nucleotides, at least 30 nucleotides, at least 31 nucleotides, at least 32 nucleotides, at least 33 nucleotides, at least 34 nucleotides or at least 35 nucleotides.

[0019] The invention also provides for an isolated dsNA, wherein each of the first and the second strands has a length which is at least 27 and at most 30 nucleotides, at least 28 and at most 30 nucleotides and at least 29 and at most 30 nucleotides.

[0020] The invention provides for an isolated dsNA that is sufficiently complementary to a target EGFR mRNA sequence along at least 15, 16, 17, 18, 19, 20, 21, 22, 23, 24, 25 or more nucleotides of the second oligonucleotide strand length to reduce EGFR target mRNA expression when the dsNA is introduced into a mammalian cell.

[0021] In one embodiment, the dsNA of the invention has a first oligonucleotide strand having a 5′-terminus and a 3′-terminus and a second oligonucleotide strand having a 5′-terminus and a 3′-terminus.

[0022] In one embodiment, the second strand includes a sequence of SEQ ID NOs: 357-616. In another embodiment, the first strand includes a sequence of SEQ ID NOs: 1-260, 1069-1328, 1781-2040 and 2137-2396. In one embodiment, the dsNA includes a pair of first strand/second strand sequences selected from Table 2, 3, 7 or 9.

[0023] In another embodiment, the second strand possesses 1-5 single-stranded nucleotides at its 3′ terminus (referred to as a “3′ overhang”). Optionally, the 3′ overhang is 1-4, 1-3, 1-2 or a single nucleotide in length. In certain embodiments, the 3′ overhang includes a modified nucleotide. Optionally, the modified nucleotide of the 3′ overhang is a 2′-O-methyl ribonucleotide.

[0024] In one embodiment, the dsNA includes a modified nucleotide.

[0025] In one embodiment, the modified nucleotide residue(s) of the dsNA is 2′-O-methyl, 2′-methoxyethoxy, 2′-fluoro, 2′-allyl, 2′-O-[2-(methylamino)-2-oxoethyl], 4′-thio, 4′-CH2-0-2′-bridge, 4′-(CH2)2-O-2′-bridge, 2′-LNA, 2′-amino or 2′-O—(N-methlycarbamate).

[0026] In another embodiment, all nucleotides of the 3′ overhang are modified nucleotides.

[0027] In one embodiment, starting from the first nucleotide (position 1) at the 3′ terminus of the first strand, position 1, 2 and/or 3 is substituted with a modified nucleotide. In a related embodiment, the modified nucleotide residue of the 3′ terminus of the first strand is a deoxyribonucleotide, an acyclonucleotide or a fluorescent molecule. Optionally, position 1 of the 3′ terminus of the first strand is a deoxyribonucleotide.

[0028] In certain embodiments, the 3′ terminus of the first strand and the 5′ terminus of the second strand form a blunt end.

[0029] In one embodiment, the first strand is 25 nucleotides in length and the second strand is 27 nucleotides in length.

[0030] In another embodiment, each of the first and the second strands is at least 26 nucleotides long.

[0031] In an additional embodiment, one or both of the first and second strands includes a 5′ phosphate.

[0032] In one embodiment, starting from the 5′ end of a EGFR mRNA sequence of Table 16 (position 1), mammalian Ago2 cleaves the mRNA at a site between positions 9 and 10 of the sequence, thereby reducing EGFR target mRNA expression when the double stranded nucleic acid is introduced into a mammalian cell.

[0033] In a related embodiment, starting from the 5′ end of a EGFR mRNA sequence of Table 6, mammalian Ago2 cleaves the mRNA at a site between positions 9 and 10 of the mRNA sequence, thereby reducing EGFR target mRNA expression when the double stranded nucleic acid is introduced into a mammalian cell.

[0034] In one embodiment, the second strand, starting from the nucleotide residue of the second strand that is complementary to the 5′ terminal nucleotide residue of the first strand, possesses alternating modified and unmodified nucleotide residues. Optionally, the second strand, starting from the nucleotide residue of the second strand that is complementary to the 5′ terminal nucleotide residue of the first strand, possesses unmodified nucleotide residues at all positions from position 18 to the 5′ terminus of the second strand.

[0035] In one embodiment, each of the first strand and the second strand is 25-35 nucleotides in length. Optionally, each of the first and the second strands has a length which is at least 26 and at most 30 nucleotides.

[0036] In another embodiment, the second strand comprises a modification pattern as shown in FIG. 4A. In a further embodiment, the second oligonucleotide strand includes a modification pattern selected from AS-M1 to AS-M46 and AS-M1* to AS-M46*. Optionally, the first oligonucleotide strand includes a modification pattern selected from SM1 to SM22.

[0037] In one embodiment, the dsNA is cleaved endogenously in the cell by Dicer. Optionally, a nucleotide of the second or first strand is substituted with a modified nucleotide that directs the orientation of Dicer cleavage. In an additional embodiment, the orientation of Dicer cleavage is directed by the end structure of the dsNA (e.g., Dicer preferentially cleaves a 21mer of a blunt/overhang dsNA of the invention such that the overhang end is retained by the resultant preferred 21mer).

[0038] In another embodiment, the amount of the isolated double stranded nucleic acid sufficient to reduce expression of the target gene is 1 nanomolar or less, 200 picomolar or less, 100 picomolar or less, 50 picomolar or less, 20 picomolar or less, 10 picomolar or less, 5 picomolar or less, 2, picomolar or less, or even 1 picomolar or less in the environment of the cell.

[0039] In one embodiment, the isolated dsNA possesses greater potency than an isolated 21mer siRNA directed to the identical at least 15 nucleotides (or 19 nucleotides) of the target EGFR cDNA in reducing target EGFR gene expression when assayed in vitro in a mammalian cell at an effective concentration of 1 nanomolar or less, 300 picomolar or less, 200 picomolar or less, 100 picomolar or less, 50 picomolar or less, 20 picomolar or less, 10 picomolar or less, 5 picomolar or less, 2, picomolar or less or even 1 picomolar or less in the environment of a cell.

[0040] In another embodiment, the isolated dsNA is sufficiently complementary to the target EGFR cDNA sequence to reduce EGFR target gene expression by at least 10%, at least 50%, at least 80-90%, at least 95%, at least 98%, or at least 99% when the double stranded nucleic acid is introduced into a mammalian cell.

[0041] In one embodiment, the first and second strands are joined by a chemical linker. Optionally, the 3′ terminus of the first strand and the 5′ terminus of the second strand are joined by a chemical linker.

[0042] In another embodiment, the dsNA possesses a deoxyribonucleotide, a dideoxyribonucleotide, an acyclonucleotide, a 3′-deoxyadenosine (cordycepin), a 3′-azido-3′-deoxythymidine (AZT), a 2′,3′-dideoxyinosine (ddI), a 2′,3′-dideoxy-3′-thiacytidine (3TC), a 2′,3′-didehydro-2′,3′-dideoxythymidine (d4T), a monophosphate nucleotide of 3′-azido-3′-deoxythymidine (AZT), a 2′,3′-dideoxy-3′-thiacytidine (3TC) and a monophosphate nucleotide of 2′,3′-didehydro-2′,3′-dideoxythymidine (d4T), a 4-thiouracil, a 5-bromouracil, a 5-iodouracil, a 5-(3-aminoallyl)-uracil, a 2′-O-alkyl ribonucleotide, a 2′-O-methyl ribonucleotide, a 2′-amino ribonucleotide, a 2′-fluoro ribonucleotide, or a locked nucleic acid. Optionally, the dsNA possesses a phosphate backbone modification that is a phosphonate, a phosphorothioate or a phosphotriester. In one embodiment, the dsNA possesses a morpholino nucleic acid or a peptide nucleic acid (PNA).

[0043] In another embodiment, the second strand is sufficiently complementary to a target EGFR cDNA sequence of Table 13 along at least 19 nucleotides of the second strand length to reduce EGFR target gene expression when the double stranded nucleic acid is introduced into a mammalian cell.

[0044] In another aspect, the invention provides a method for reducing expression of a target EGFR gene in a mammalian cell involving contacting a mammalian cell in vitro with an isolated dsNA of the invention in an amount sufficient to reduce expression of a target EGFR gene in the cell. In one embodiment, target EGFR gene expression is reduced by at least 10%, at least 50% or at least 80-90%. Optionally, EGFR mRNA levels are reduced by at least 90% at least 8 days after the cell is contacted with the dsNA. In certain embodiments, EGFR mRNA levels are reduced by at least 70% at least 10 days after the cell is contacted with the dsNA.

[0045] In a further aspect, the invention provides a method for reducing expression of a target EGFR gene in a mammal that involves administering an isolated dsNA of the invention to a mammal in an amount sufficient to reduce expression of a target EGFR gene in the mammal Optionally, the isolated dsNA is administered at a dosage of 1 microgram to 5 milligrams per kilogram of the mammal per day, 100 micrograms to 0.5 milligrams per kilogram, 0.001 to 0.25 milligrams per kilogram, 0.01 to 20 micrograms per kilogram, 0.01 to 10 micrograms per kilogram, 0.10 to 5 micrograms per kilogram, or 0.1 to 2.5 micrograms per kilogram. In one embodiment, the administering step involves intravenous injection, intramuscular injection, intraperitoneal injection, infusion, subcutaneous injection, transdermal, aerosol, rectal, vaginal, topical, oral or inhaled delivery.

[0046] In another aspect, the invention provides a method for selectively inhibiting the growth of a cell that involves contacting a cell with an amount of an isolated dsNA of the invention sufficient to inhibit the growth of the cell. In one embodiment, the cell is a tumor cell of a subject. Optionally, wherein the cell is a tumor cell in vitro. In certain embodiments, the cell is a human cell. In certain embodiments, the tumor cell is a tumor cell of a subject. Optionally, the tumor cell is a non-small cell lung cancer cell. In certain embodiments, the non-small cell lung cancer cell is erlotinib resistant. In one embodiment, the non-small cell lung cancer cell does not comprise a KRAS mutation. Optionally, the growth of the cell is inhibited by an amount selected from the group consisting of at least 15%, at least 25%, at least 40% and at least 50%, as compared to an appropriate control.

[0047] In a further aspect, the invention provides a formulation that includes an isolated dsNA of the invention, where the dsNA is present in an amount effective to reduce target EGFR RNA levels when the dsNA is introduced into a mammalian cell in vitro by at least 10%, at least 50% or at least 80-90%, and the dsNA possesses greater potency than an isolated 21mer siRNA directed to the identical at least 15 nucleotides of the target EGFR cDNA in reducing target EGFR RNA levels when assayed in vitro in a mammalian cell at an effective concentration in the environment of a cell of 1 nanomolar or less. Optionally, the effective amount is 300 picomolar or less, 200 picomolar or less, 100 picomolar or less, 50 picomolar or less, 20 picomolar or less, 10 picomolar or less, 5 picomolar or less, 2, picomolar or less or 1 picomolar or less in the environment of the cell.

[0048] Another aspect of the invention provides a formulation that includes an isolated dsNA of the invention, where the dsNA is present in an amount effective to reduce target EGFR RNA levels when the dsNA is introduced into a cell of a mammalian subject by at least 10%, at least 50% or at least 80-90%, and the dsNA possesses greater potency than an isolated 21mer siRNA directed to the identical at least 15 nucleotides of the target EGFR cDNA in reducing target EGFR RNA levels when assayed in vitro in a mammalian cell at an effective concentration in the environment of a cell of 1 nanomolar or less. In one embodiment, the effective amount is a dosage of 1 microgram to 5 milligrams per kilogram of the subject per day, 100 micrograms to 0.5 milligrams per kilogram, 0.001 to 0.25 milligrams per kilogram, 0.01 to 20 micrograms per kilogram, 0.01 to 10 micrograms per kilogram, 0.10 to 5 micrograms per kilogram, or 0.1 to 2.5 micrograms per kilogram.

[0049] A further aspect of the invention provides a mammalian cell containing the isolated dsNA the invention.

[0050] Another aspect of the invention provides a pharmaceutical composition containing an isolated dsNA of the invention and a pharmaceutically acceptable carrier.

[0051] A further aspect of the invention provides a kit containing an isolated dsNA of the invention and instructions for its use.

[0052] Another aspect of the invention provides a composition possessing EGFR inhibitory activity consisting essentially of an isolated dsNA of the invention.

[0053] An additional aspect of the invention provides a composition possessing EGFR inhibitory activity consisting essentially of an isolated double stranded nucleic acid (dsNA) possessing first and second nucleic acid strands, where the first strand is 25-35 nucleotides in length and the second strand of the dsNA is 25-35 nucleotides in length, where the second strand is sufficiently complementary to a target EGFR cDNA sequence of Table 13 along at least 15 nucleotides of the second strand length to reduce EGFR target gene expression when the double stranded nucleic acid is introduced into a mammalian cell.

[0054] In one embodiment, the isolated dsNA possesses a duplex region of at least 25 base pairs.

[0055] Another aspect of the invention provides a method for treating or preventing an EGFR-associated disease or disorder in a subject involving administering an isolated dsNA of the invention and a pharmaceutically acceptable carrier to the subject in an amount sufficient to treat or prevent the EGFR-associated disease or disorder in the subject, thereby treating or preventing the EGFR-associated disease or disorder in the subject.

[0056] In one embodiment, the EGFR-associated disease or disorder is selected from the group consisting of squamous cell carcinoma of the head and neck (SCCHN), lung and colorectal cancer.

[0057] Another aspect of the invention provides an isolated double stranded nucleic acid (dsNA) possessing first and second nucleic acid strands, where the dsNA possesses blunt ends, where each of the first and second strands consists of the same number of nucleotide residues and is at most 35 nucleotides in length, where the second strand is sufficiently complementary to a target EGFR cDNA sequence of Table 13 along at least 15 nucleotides of the second strand length to reduce EGFR target gene expression when the double stranded nucleic acid is introduced into a mammalian cell, and where the dsNA reduces EGFR mRNA levels by at least 70% when assayed in vitro in a mammalian cell at an effective concentration in the environment of the cell of 1 nanomolar or less. In one embodiment, each of the first strand and the second strand is 25-35 nucleotides in length.

[0058] In one embodiment, each of the first and the second strands has a length which is 26-30 nucleotides. Optionally, each of the first and the second strands has a length which is 27 nucleotides.

[0059] Another aspect of the invention provides an isolated double stranded nucleic acid (dsNA) possessing first and second nucleic acid strands, where the dsNA possesses a blunt end, where each of the first and second strands consists of the same number of nucleotide residues and is at most 35 nucleotides in length, where the ultimate and penultimate residues of the 3′ terminus of the first strand and the ultimate and penultimate residues of the 5′ terminus of the second strand form one or two mismatched based pairs, where the second strand is sufficiently complementary to a target EGFR cDNA sequence selected from Table 13 along at least 15 nucleotides of the second strand length to reduce EGFR target gene expression when the double stranded nucleic acid is introduced into a mammalian cell, and where the dsNA reduces EGFR mRNA levels by at least 70% when assayed in vitro in a mammalian cell at an effective concentration in the environment of the cell of 1 nanomolar or less.

[0060] A further aspect of the invention provides a composition possessing EGFR inhibitory activity consisting essentially of an isolated double stranded ribonucleic acid (dsNA) possessing first and second nucleic acid strands, where the dsNA comprises a blunt end, where each of the first and second strands consists of the same number of nucleotide residues and is at most 35 nucleotides in length, where the ultimate and penultimate residues of the 3′terminus of the first strand and the ultimate and penultimate residues of the 5′ terminus of the second strand form one or two mismatched based pairs, where the second strand is sufficiently complementary to a target EGFR cDNA sequence of Table 13 along at least 15 nucleotides of the second strand length to reduce EGFR target gene expression when the double stranded nucleic acid is introduced into a mammalian cell, and where the dsNA reduces EGFR mRNA levels by at least 70% when assayed in vitro in a mammalian cell at an effective concentration in the environment of the cell of 1 nanomolar or less.

[0061] The present invention is also directed to compounds, compositions, and methods relating to traits, diseases and conditions that respond to the modulation of expression and/or activity of genes involved in EGFR gene expression pathways or other cellular processes that mediate the maintenance or development of such traits, diseases and conditions. In certain aspects, the invention relates to small nucleic acid molecules that are capable of being processed by the Dicer enzyme, such as Dicer substrate siRNAs (DsiRNAs) capable of mediating RNA interference (RNAi) against EGFR gene expression. The anti-EGFR dsNAs of the invention are useful, for example, in providing compositions for treatment of traits, diseases and conditions that can respond to modulation of EGFR in a subject, such as cancer and/or other proliferative diseases, disorders, or conditions. Efficacy, potency, toxicity and other effects of an anti-EGFR dsNA can be examined in one or more animal models of proliferative disease (exemplary animal models of proliferative disease are recited below).

### BRIEF DESCRIPTION OF THE DRAWINGS

[0062] FIG. 1 shows the structures of exemplary DsiRNA agents of the invention targeting a site in the EGFR RNA referred to herein as the “EGFR-4249” target site. UPPER case=unmodified RNA, lower case=DNA, Bold=mismatch base pair nucleotides; arrowheads indicate projected Dicer enzyme cleavage sites; dashed line indicates sense strand (top strand) sequences corresponding to the projected Argonaute 2 (Ago2) cleavage site within the targeted EGFR sequence.

[0063] FIGS. 2A to 2D present primary screen data showing DsiRNA-mediated knockdown of human EGFR (FIGS. 2A and 2B) and mouse EGFR (FIGS. 2C and 2D) in human and mouse cells, respectively. For each DsiRNA tested, two independent qPCR amplicons were assayed (in human cells, amplicons “1068-1232” and “4704-4789” were assayed, while in mouse cells, amplicons “1955-2098” and “3602-3699” were assayed).

[0064] FIGS. 3A to 3D show histograms of human and mouse EGFR inhibitory efficacies observed for indicated DsiRNAs. “P1” indicates phase 1 (primary screen), while “P2” indicates phase 2. In phase 1, DsiRNAs were tested at 1 nM in the environment of HeLa cells (human cell assays; FIGS. 3A and 3B) or mouse cells (Hepa1-6 cell assays; FIGS. 3C and 3D). In phase 2, DsiRNAs were tested at 1 nM, at 0.3 nM and at 0.1 nM in the environment of human HeLa cells or mouse Hepa1-6 cells. Individual bars represent average human (FIGS. 3A and 3B) or mouse (FIGS. 3C and 3D) EGFR levels observed in triplicate, with standard errors shown. Human EGFR levels were normalized to HPRT and SFRS9 levels, while mouse EGFR levels were normalized to HPRT and Rp123 levels.

[0065] FIGS. 4A to 4I present modification patterns employed (FIG. 4A) and bar graphs showing efficacy data (FIGS. 4B to 4I) for six different 2′-O-methyl modification patterns (“M1”, “M11”, “M20”, “M25”, “M35”, and “M8”, respectively) each across 32 EGFR-targeting DsiRNAs in human HeLa cells at 0.1 nM, 0.3 nM and 1 nM.

### DETAILED DESCRIPTION OF THE INVENTION

[0066] The present invention is directed to compositions that contain double stranded RNA (“dsRNA”), and methods for preparing them, that are capable of reducing the level and/or expression of the EGFR gene in vivo or in vitro. One of the strands of the dsRNA contains a region of nucleotide sequence that has a length that ranges from 19 to 35 nucleotides that can direct the destruction and/or translational inhibition of the targeted EGFR transcript.

### DEFINITIONS

[0067] Unless defined otherwise, all technical and scientific terms used herein have the meaning commonly understood by a person skilled in the art to which this invention belongs. The following references provide one of skill with a general definition of many of the terms used in this invention: Singleton et al., Dictionary of Microbiology and Molecular Biology (2nd ed. 1994); The Cambridge Dictionary of Science and Technology (Walker ed., 1988); The Glossary of Genetics, 5th Ed., R. Rieger et al. (eds.), Springer Verlag (1991); and Hale & Marham, The Harper Collins Dictionary of Biology (1991). As used herein, the following terms have the meanings ascribed to them below, unless specified otherwise.

[0068] The present invention features one or more DsiRNA molecules that can modulate (e.g., inhibit) EGFR expression. The DsiRNAs of the invention optionally can be used in combination with modulators of other genes and/or gene products associated with the maintenance or development of diseases or disorders associated with EGFR misregulation (e.g., tumor formation and/or growth, etc.). The DsiRNA agents of the invention modulate EGFR RNAs such as those corresponding to the cDNA sequences referred to by GenBank Accession Nos. NM_{—}005228.3 (human EGFR) and NM_{—}207655.2 (mouse EGFR), which are recited below and referred to herein generally as “EGFR.”

[0069] The below description of the various aspects and embodiments of the invention is provided with reference to exemplary EGFR RNAs, generally referred to herein as EGFR. However, such reference is meant to be exemplary only and the various aspects and embodiments of the invention are also directed to alternate EGFR RNAs, such as mutant EGFR RNAs or additional EGFR splice variants. Certain aspects and embodiments are also directed to other genes involved in EGFR pathways, including genes whose misregulation acts in association with that of EGFR (or is affected or affects EGFR regulation) to produce phenotypic effects that may be targeted for treatment (e.g., tumor formation and/or growth, etc.). (The EGFR pathway, MAPK, Akt, JNK and MET pathways are examples of pathways for which misregulation of genes can act in association with that of EGFR.) Such additional genes can be targeted using dsRNA and the methods described herein for use of EGFR targeting dsRNAs. Thus, the inhibition and the effects of such inhibition of the other genes can be performed as described herein.

[0070] The term “EGFR” refers to nucleic acid sequences encoding an EGFR protein, peptide, or polypeptide (e.g., EGFR transcripts, such as the sequences of EGFR Genbank Accession Nos. NM_{—}005228.3 and NM_{—}207655.2). In certain embodiments, the term “EGFR” is also meant to include other EGFR encoding sequence, such as other EGFR isoforms, mutant EGFR genes, splice variants of EGFR genes, and EGFR gene polymorphisms. The term “EGFR” is also used to refer to the polypeptide gene product of an EGFR gene/transcript, e.g., an EGFR protein, peptide, or polypeptide, such as those encoded by EGFR Genbank Accession Nos. NM_{—}005228.3 and NM_{—}207655.2.

[0071] As used herein, a “EGFR-associated disease or disorder” refers to a disease or disorder known in the art to be associated with altered EGFR expression, level and/or activity. Notably, an “EGFR-associated disease or disorder” includes cancer and/or proliferative diseases, conditions, or disorders. Exemplary “EGFR-associated disease or disorders” include colorectal, lung (e.g., NSCLC), squamous cell carcinoma (e.g., of the head and neck (SCCHN)), bladder, brain, breast, cervical (uterine), endometrial (uterine), esophageal, liver, oropharyngeal, ovarian, pancreatic, renal, skin (melanoma) and stomach (GIST) cancers.

[0072] By “proliferative disease” or “cancer” as used herein is meant a disease, condition, trait, genotype or phenotype characterized by unregulated cell growth or replication as is known in the art; including squamous cell carcinoma (e.g., of the head and neck (SCCHN)), colorectal cancer, lung cancer, leukemias, for example, acute myelogenous leukemia (AML), chronic myelogenous leukemia (CML), acute lymphocytic leukemia (ALL), and chronic lymphocytic leukemia, AIDS related cancers such as Kaposi's sarcoma; breast cancers; bone cancers such as Osteosarcoma, Chondrosarcomas, Ewing's sarcoma, Fibrosarcomas, Giant cell tumors, Adamantinomas, and Chordomas; Brain cancers such as Meningiomas, Glioblastomas, Lower-Grade Astrocytomas, Oligodendrocytomas, Pituitary Tumors, Schwannomas, and Metastatic brain cancers; cancers of the head and neck including various lymphomas such as mantle cell lymphoma, non-Hodgkins lymphoma, adenoma, laryngeal carcinoma, gallbladder and bile duct cancers, cancers of the retina such as retinoblastoma, cancers of the esophagus, gastric cancers, multiple myeloma, ovarian cancer, uterine cancer, thyroid cancer, testicular cancer, endometrial cancer, melanoma, bladder cancer, prostate cancer, lung cancer (including non-small cell lung carcinoma), pancreatic cancer, sarcomas, Wilms' tumor, cervical cancer, head and neck cancer, skin cancers, nasopharyngeal carcinoma, liposarcoma, epithelial carcinoma, renal cell carcinoma, gallbladder adeno carcinoma, parotid adenocarcinoma, endometrial sarcoma, multidrug resistant cancers; and proliferative diseases and conditions, such as neovascularization associated with tumor angiogenesis, macular degeneration (e.g., wet/dry AMD), corneal neovascularization, diabetic retinopathy, neovascular glaucoma, myopic degeneration and other proliferative diseases and conditions such as restenosis and polycystic kidney disease, and other cancer or proliferative disease, condition, trait, genotype or phenotype that can respond to the modulation of disease related gene expression in a cell or tissue, alone or in combination with other therapies.

[0073] In certain embodiments, dsRNA-mediated inhibition of an EGFR target sequence is assessed. In such embodiments, EGFR RNA levels can be assessed by art-recognized methods (e.g., RT-PCR, Northern blot, expression array, etc.), optionally via comparison of EGFR levels in the presence of an anti-EGFR dsRNA of the invention relative to the absence of such an anti-EGFR dsRNA. In certain embodiments, EGFR levels in the presence of an anti-EGFR dsRNA are compared to those observed in the presence of vehicle alone, in the presence of a dsRNA directed against an unrelated target RNA, or in the absence of any treatment.

[0074] It is also recognized that levels of EGFR protein can be assessed and that EGFR protein levels are, under different conditions, either directly or indirectly related to EGFR RNA levels and/or the extent to which a dsRNA inhibits EGFR expression, thus art-recognized methods of assessing EGFR protein levels (e.g., Western blot, immunoprecipitation, other antibody-based methods, etc.) can also be employed to examine the inhibitory effect of a dsRNA of the invention.

[0075] An anti-EGFR dsRNA of the invention is deemed to possess “EGFR inhibitory activity” if a statistically significant reduction in EGFR RNA (or when the EGFR protein is assessed, EGFR protein levels) is seen when an anti-EGFR dsRNA of the invention is administered to a system (e.g., cell-free in vitro system), cell, tissue or organism, as compared to a selected control. The distribution of experimental values and the number of replicate assays performed will tend to dictate the parameters of what levels of reduction in EGFR RNA (either as a % or in absolute terms) is deemed statistically significant (as assessed by standard methods of determining statistical significance known in the art). However, in certain embodiments, “EGFR inhibitory activity” is defined based upon a % or absolute level of reduction in the level of EGFR in a system, cell, tissue or organism. For example, in certain embodiments, a dsRNA of the invention is deemed to possess EGFR inhibitory activity if at least a 5% reduction or at least a 10% reduction in EGFR RNA is observed in the presence of a dsRNA of the invention relative to EGFR levels seen for a suitable control. (For example, in vivo EGFR levels in a tissue and/or subject can, in certain embodiments, be deemed to be inhibited by a dsRNA agent of the invention if, e.g., a 5% or 10% reduction in EGFR levels is observed relative to a control.) In certain other embodiments, a dsRNA of the invention is deemed to possess EGFR inhibitory activity if EGFR RNA levels are observed to be reduced by at least 15% relative to a selected control, by at least 20% relative to a selected control, by at least 25% relative to a selected control, by at least 30% relative to a selected control, by at least 35% relative to a selected control, by at least 40% relative to a selected control, by at least 45% relative to a selected control, by at least 50% relative to a selected control, by at least 55% relative to a selected control, by at least 60% relative to a selected control, by at least 65% relative to a selected control, by at least 70% relative to a selected control, by at least 75% relative to a selected control, by at least 80% relative to a selected control, by at least 85% relative to a selected control, by at least 90% relative to a selected control, by at least 95% relative to a selected control, by at least 96% relative to a selected control, by at least 97% relative to a selected control, by at least 98% relative to a selected control or by at least 99% relative to a selected control. In some embodiments, complete inhibition of EGFR is required for a dsRNA to be deemed to possess EGFR inhibitory activity. In certain models (e.g., cell culture), a dsRNA is deemed to possess EGFR inhibitory activity if at least a 50% reduction in EGFR levels is observed relative to a suitable control. In certain other embodiments, a dsRNA is deemed to possess EGFR inhibitory activity if at least an 80% reduction in EGFR levels is observed relative to a suitable control.

[0076] By way of specific example, in Example 2 below, a series of DsiRNAs targeting EGFR were tested for the ability to reduce EGFR mRNA levels in human HeLa or mouse Hepa 1-6 cells in vitro, at 1 nM concentrations in the environment of such cells and in the presence of a transfection agent (Lipofectamine™ RNAiMAX, Invitrogen). Within Example 2 below, EGFR inhibitory activity was initially ascribed to those DsiRNAs that were observed to effect at least a 70% reduction of EGFR mRNA levels under the assayed conditions. It is contemplated that EGFR inhibitory activity could also be attributed to a dsRNA under either more or less stringent conditions than those employed for Example 2 below, even when the same or a similar assay and conditions are employed. For example, in certain embodiments, a tested dsRNA of the invention is deemed to possess EGFR inhibitory activity if at least a 10% reduction, at least a 20% reduction, at least a 30% reduction, at least a 40% reduction, at least a 50% reduction, at least a 60% reduction, at least a 75% reduction, at least an 80% reduction, at least an 85% reduction, at least a 90% reduction, or at least a 95% reduction in EGFR mRNA levels is observed in a mammalian cell line in vitro at 1 nM dsRNA concentration or lower in the environment of a cell, relative to a suitable control.

[0077] Use of other endpoints for determination of whether a double stranded RNA of the invention possesses EGFR inhibitory activity is also contemplated. Specifically, in one embodiment, in addition to or as an alternative to assessing EGFR mRNA levels, the ability of a tested dsRNA to reduce EGFR protein levels (e.g., at 48 hours after contacting a mammalian cell in vitro or in vivo) is assessed, and a tested dsRNA is deemed to possess EGFR inhibitory activity if at least a 10% reduction, at least a 20% reduction, at least a 30% reduction, at least a 40% reduction, at least a 50% reduction, at least a 60% reduction, at least a 70% reduction, at least a 75% reduction, at least an 80% reduction, at least an 85% reduction, at least a 90% reduction, or at least a 95% reduction in EGFR protein levels is observed in a mammalian cell contacted with the assayed double stranded RNA in vitro or in vivo, relative to a suitable control. Additional endpoints contemplated include, e.g., assessment of a phenotype associated with reduction of EGFR levels—e.g., reduction of growth of a contacted mammalian cell line in vitro and/or reduction of growth of a tumor in vivo, including, e.g., halting or reducing the growth of tumor or cancer cell levels as described in greater detail elsewhere herein.

[0078] EGFR inhibitory activity can also be evaluated over time (duration) and over concentration ranges (potency), with assessment of what constitutes a dsRNA possessing EGFR inhibitory activity adjusted in accordance with concentrations administered and duration of time following administration. Thus, in certain embodiments, a dsRNA of the invention is deemed to possess EGFR inhibitory activity if at least a 50% reduction in EGFR activity is observed/persists at a duration of time of 2 hours, 5 hours, 10 hours, 1 day, 2 days, 3 days, 4 days, 5 days, 6 days, 7 days, 8 days, 9 days, 10 days or more after administration of the dsRNA to a cell or organism. In additional embodiments, a dsRNA of the invention is deemed to be a potent EGFR inhibitory agent if EGFR inhibitory activity (e.g., in certain embodiments, at least 50% inhibition of EGFR) is observed at a concentration of 1 nM or less, 500 pM or less, 200 pM or less, 100 pM or less, 50 pM or less, 20 pM or less, 10 pM or less, 5 pM or less, 2 pM or less or even 1 pM or less in the environment of a cell, for example, within an in vitro assay for EGFR inhibitory activity as described herein. In certain embodiments, a potent EGFR inhibitory dsRNA of the invention is defined as one that is capable of EGFR inhibitory activity (e.g., in certain embodiments, at least 20% reduction of EGFR levels) at a formulated concentration of 10 mg/kg or less when administered to a subject in an effective delivery vehicle (e.g., an effective lipid nanoparticle formulation). Preferably, a potent EGFR inhibitory dsRNA of the invention is defined as one that is capable of EGFR inhibitory activity (e.g., in certain embodiments, at least 50% reduction of EGFR levels) at a formulated concentration of 5 mg/kg or less when administered to a subject in an effective delivery vehicle. More preferably, a potent EGFR inhibitory dsRNA of the invention is defined as one that is capable of EGFR inhibitory activity (e.g., in certain embodiments, at least 50% reduction of EGFR levels) at a formulated concentration of 5 mg/kg or less when administered to a subject in an effective delivery vehicle. Optionally, a potent EGFR inhibitory dsRNA of the invention is defined as one that is capable of EGFR inhibitory activity (e.g., in certain embodiments, at least 50% reduction of EGFR levels) at a formulated concentration of 2 mg/kg or less, or even 1 mg/kg or less, when administered to a subject in an effective delivery vehicle.

[0079] In certain embodiments, potency of a dsRNA of the invention is determined in reference to the number of copies of a dsRNA present in the cytoplasm of a target cell that are required to achieve a certain level of target gene knockdown. For example, in certain embodiments, a potent dsRNA is one capable of causing 50% or greater knockdown of a target mRNA when present in the cytoplasm of a target cell at a copy number of 1000 or fewer RISC-loaded antisense strands per cell. More preferably, a potent dsRNA is one capable of producing 50% or greater knockdown of a target mRNA when present in the cytoplasm of a target cell at a copy number of 500 or fewer RISC-loaded antisense strands per cell. Optionally, a potent dsRNA is one capable of producing 50% or greater knockdown of a target mRNA when present in the cytoplasm of a target cell at a copy number of 300 or fewer RISC-loaded antisense strands per cell.

[0080] In further embodiments, the potency of a DsiRNA of the invention can be defined in reference to a 19 to 23mer dsRNA directed to the same target sequence within the same target gene. For example, a DsiRNA of the invention that possesses enhanced potency relative to a corresponding 19 to 23mer dsRNA can be a DsiRNA that reduces a target gene by an additional 5% or more, an additional 10% or more, an additional 20% or more, an additional 30% or more, an additional 40% or more, or an additional 50% or more as compared to a corresponding 19 to 23mer dsRNA, when assayed in an in vitro assay as described herein at a sufficiently low concentration to allow for detection of a potency difference (e.g., transfection concentrations at or below 1 nM in the environment of a cell, at or below 100 pM in the environment of a cell, at or below 10 pM in the environment of a cell, at or below 1 nM in the environment of a cell, in an in vitro assay as described herein; notably, it is recognized that potency differences can be best detected via performance of such assays across a range of concentrations—e.g., 0.1 pM to 10 nM—for purpose of generating a dose-response curve and identifying an IC50 value associated with a DsiRNA/dsRNA).

[0081] EGFR inhibitory levels and/or EGFR levels may also be assessed indirectly, e.g., measurement of a reduction of the size, number and/or rate of growth or spread of polyps or tumors in a subject may be used to assess EGFR levels and/or EGFR inhibitory efficacy of a double-stranded nucleic acid of the instant invention.

[0082] In certain embodiments, the phrase “consists essentially of” is used in reference to the anti-EGFR dsRNAs of the invention. In some such embodiments, “consists essentially of” refers to a composition that comprises a dsRNA of the invention which possesses at least a certain level of EGFR inhibitory activity (e.g., at least 50% EGFR inhibitory activity) and that also comprises one or more additional components and/or modifications that do not significantly impact the EGFR inhibitory activity of the dsRNA. For example, in certain embodiments, a composition “consists essentially of” a dsRNA of the invention where modifications of the dsRNA of the invention and/or dsRNA-associated components of the composition do not alter the EGFR inhibitory activity (optionally including potency or duration of EGFR inhibitory activity) by greater than 3%, greater than 5%, greater than 10%, greater than 15%, greater than 20%, greater than 25%, greater than 30%, greater than 35%, greater than 40%, greater than 45%, or greater than 50% relative to the dsRNA of the invention in isolation. In certain embodiments, a composition is deemed to consist essentially of a dsRNA of the invention even if more dramatic reduction of EGFR inhibitory activity (e.g., 80% reduction, 90% reduction, etc. in efficacy, duration and/or potency) occurs in the presence of additional components or modifications, yet where EGFR inhibitory activity is not significantly elevated (e.g., observed levels of EGFR inhibitory activity are within 10% those observed for the isolated dsRNA of the invention) in the presence of additional components and/or modifications.

[0083] As used herein, the phrase “dsRNA reduces EGFR mRNA levels by at least X % when assayed in vitro in a mammalian cell at an effective concentration in the environment of said cell of 1 nanomolar or less” refers to a requirement for the dsRNA to reduce the native EGFR mRNA levels of a HeLa cell population by at least X %, when assayed at a transfection concentration of 1 nanomolar or less in the presence of Lipofectamine™ RNAiMAX (Invitrogen) and following manufacturer's instructions. Such HeLa cells are obtained from ATCC and maintained in DMEM (HyClone) supplemented with 10% fetal bovine serum (HyClone) at 37° C. under 5% CO₂. EGFR mRNA levels are then assayed at 24 h or 48 h post-transfection to assess % inhibition, with respect to an appropriate control as described elsewhere herein.

[0084] As used herein, the term “nucleic acid” refers to deoxyribonucleotides, ribonucleotides, or modified nucleotides, and polymers thereof in single- or double-stranded form. The term encompasses nucleic acids containing known nucleotide analogs or modified backbone residues or linkages, which are synthetic, naturally occurring, and non-naturally occurring, which have similar binding properties as the reference nucleic acid, and which are metabolized in a manner similar to the reference nucleotides. Examples of such analogs include, without limitation, phosphorothioates, phosphoramidates, methyl phosphonates, chiral-methyl phosphonates, 2-O-methyl ribonucleotides, peptide-nucleic acids (PNAs) and unlocked nucleic acids (UNAs; see, e.g., Jensen et al. Nucleic Acids Symposium Series 52: 133-4), and derivatives thereof.

[0085] As used herein, “nucleotide” is used as recognized in the art to include those with natural bases (standard), and modified bases well known in the art. Such bases are generally located at the 1′ position of a nucleotide sugar moiety. Nucleotides generally comprise a base, sugar and a phosphate group. The nucleotides can be unmodified or modified at the sugar, phosphate and/or base moiety, (also referred to interchangeably as nucleotide analogs, modified nucleotides, non-natural nucleotides, non-standard nucleotides and other; see, e.g., Usman and McSwiggen, supra; Eckstein, et al., International PCT Publication No. WO 92/07065; Usman et al, International PCT Publication No. WO 93/15187; Uhlman & Peyman, supra, all are hereby incorporated by reference herein). There are several examples of modified nucleic acid bases known in the art as summarized by Limbach, et al, Nucleic Acids Res. 22:2183, 1994. Some of the non-limiting examples of base modifications that can be introduced into nucleic acid molecules include, hypoxanthine, purine, pyridin-4-one, pyridin-2-one, phenyl, pseudouracil, 2,4,6-trimethoxy benzene, 3-methyl uracil, dihydrouridine, naphthyl, aminophenyl, 5-alkylcytidines (e.g., 5-methylcytidine), 5-alkyluridines (e.g., ribothymidine), 5-halouridine (e.g., 5-bromouridine) or 6-azapyrimidines or 6-alkylpyrimidines (e.g. 6-methyluridine), propyne, and others (Burgin, et al., Biochemistry 35:14090, 1996; Uhlman & Peyman, supra). By “modified bases” in this aspect is meant nucleotide bases other than adenine, guanine, cytosine and uracil at 1′ position or their equivalents.

[0086] As used herein, “modified nucleotide” refers to a nucleotide that has one or more modifications to the nucleoside, the nucleobase, pentose ring, or phosphate group. For example, modified nucleotides exclude ribonucleotides containing adenosine monophosphate, guanosine monophosphate, uridine monophosphate, and cytidine monophosphate and deoxyribonucleotides containing deoxyadenosine monophosphate, deoxyguanosine monophosphate, deoxythymidine monophosphate, and deoxycytidine monophosphate. Modifications include those naturally occurring that result from modification by enzymes that modify nucleotides, such as methyltransferases. Modified nucleotides also include synthetic or non-naturally occurring nucleotides. Synthetic or non-naturally occurring modifications in nucleotides include those with 2′ modifications, e.g., 2′-methoxyethoxy, 2′-fluoro, 2′-allyl, 2′-O-[2-(methylamino)-2-oxoethyl], 4′-thio, 4′-CH₂—O-2′-bridge, 4′-(CH₂)₂—O-2′-bridge, 2′-LNA or other bicyclic or “bridged” nucleoside analog, and 2′-O—(N-methylcarbamate) or those comprising base analogs. In connection with 2′-modified nucleotides as described for the present disclosure, by “amino” is meant 2′—NH₂ or 2′-O—NH₂, which can be modified or unmodified. Such modified groups are described, e.g., in Eckstein et al., U.S. Pat. No. 5,672,695 and Matulic-Adamic et al., U.S. Pat. No. 6,248,878. “Modified nucleotides” of the instant invention can also include nucleotide analogs as described above.

[0087] In reference to the nucleic acid molecules of the present disclosure, modifications may exist upon these agents in patterns on one or both strands of the double stranded ribonucleic acid (dsRNA). As used herein, “alternating positions” refers to a pattern where every other nucleotide is a modified nucleotide or there is an unmodified nucleotide (e.g., an unmodified ribonucleotide) between every modified nucleotide over a defined length of a strand of the dsRNA (e.g., 5′-MNMNMN-3′; 3′-MNMNMN-5′; where M is a modified nucleotide and N is an unmodified nucleotide). The modification pattern starts from the first nucleotide position at either the 5′ or 3′ terminus according to a position numbering convention, e.g., as described herein (in certain embodiments, position 1 is designated in reference to the terminal residue of a strand following a projected Dicer cleavage event of a DsiRNA agent of the invention; thus, position 1 does not always constitute a 3′ terminal or 5′ terminal residue of a pre-processed agent of the invention). The pattern of modified nucleotides at alternating positions may run the full length of the strand, but in certain embodiments includes at least 4, 6, 8, 10, 12, 14 nucleotides containing at least 2, 3, 4, 5, 6 or 7 modified nucleotides, respectively. As used herein, “alternating pairs of positions” refers to a pattern where two consecutive modified nucleotides are separated by two consecutive unmodified nucleotides over a defined length of a strand of the dsRNA (e.g., 5′-MMNNMMNNMMNN-3′; 3′-MMNNMMNNMMNN-5′; where M is a modified nucleotide and N is an unmodified nucleotide). The modification pattern starts from the first nucleotide position at either the 5′ or 3′ terminus according to a position numbering convention such as those described herein. The pattern of modified nucleotides at alternating positions may run the full length of the strand, but preferably includes at least 8, 12, 16, 20, 24, 28 nucleotides containing at least 4, 6, 8, 10, 12 or 14 modified nucleotides, respectively. It is emphasized that the above modification patterns are exemplary and are not intended as limitations on the scope of the invention.

[0088] As used herein, “base analog” refers to a heterocyclic moiety which is located at the 1′position of a nucleotide sugar moiety in a modified nucleotide that can be incorporated into a nucleic acid duplex (or the equivalent position in a nucleotide sugar moiety substitution that can be incorporated into a nucleic acid duplex). In the dsRNAs of the invention, a base analog is generally either a purine or pyrimidine base excluding the common bases guanine (G), cytosine (C), adenine (A), thymine (T), and uracil (U). Base analogs can duplex with other bases or base analogs in dsRNAs. Base analogs include those useful in the compounds and methods of the invention., e.g., those disclosed in U.S. Pat. Nos. 5,432,272 and 6,001,983 to Benner and US Patent Publication No. 20080213891 to Manoharan, which are herein incorporated by reference. Non-limiting examples of bases include hypoxanthine (I), xanthine (X), 3β-D-ribofuranosyl-(2,6-diaminopyrimidine) (K), 3-β-D-ribofuranosyl-(1-methyl-pyrazolo[4,3-d]pyrimidine-5,7(4H,6H)-dione) (P), iso-cytosine (iso-C), iso-guanine (iso-G), 1-β-D-ribofuranosyl-(5-nitroindole), 1-β-D-ribofuranosyl-(3-nitropyrrole), 5-bromouracil, 2-aminopurine, 4-thio-dT, 7-(2-thienyl)-imidazo[4,5-b]pyridine (Ds) and pyrrole-2-carbaldehyde (Pa), 2-amino-6-(2-thienyl)purine (S), 2-oxopyridine (Y), difluorotolyl, 4-fluoro-6-methylbenzimidazole, 4-methylbenzimidazole, 3-methyl isocarbostyrilyl, 5-methyl isocarbostyrilyl, and 3-methyl-7-propynyl isocarbostyrilyl, 7-azaindolyl, 6-methyl-7-azaindolyl, imidizopyridinyl, 9-methyl-imidizopyridinyl, pyrrolopyrizinyl, isocarbostyrilyl, 7-propynyl isocarbostyrilyl, propynyl-7-azaindolyl, 2,4,5-trimethylphenyl, 4-methylindolyl, 4,6-dimethylindolyl, phenyl, napthalenyl, anthracenyl, phenanthracenyl, pyrenyl, stilbenzyl, tetracenyl, pentacenyl, and structural derivates thereof (Schweitzer et al., J. Org. Chem., 59:7238-7242 (1994); Berger et al., Nucleic Acids Research, 28(15):2911-2914 (2000); Moran et al., J. Am. Chem. Soc., 119:2056-2057 (1997); Morales et al., J. Am. Chem. Soc., 121:2323-2324 (1999); Guckian et al., J. Am. Chem. Soc., 118:8182-8183 (1996); Morales et al., J. Am. Chem. Soc., 122(6):1001-1007 (2000); McMinn et al., J. Am. Chem. Soc., 121:11585-11586 (1999); Guckian et al., J. Org. Chem., 63:9652-9656 (1998); Moran et al., Proc. Natl. Acad. Sci., 94:10506-10511 (1997); Das et al., J. Chem. Soc., Perkin Trans., 1:197-206 (2002); Shibata et al., J. Chem. Soc., Perkin Trans., 1: 1605-1611 (2001); Wu et al., J. Am. Chem. Soc., 122(32):7621-7632 (2000); O'Neill et al., J. Org. Chem., 67:5869-5875 (2002); Chaudhuri et al., J. Am. Chem. Soc., 117:10434-10442 (1995); and U.S. Pat. No. 6,218,108.). Base analogs may also be a universal base.

[0089] As used herein, “universal base” refers to a heterocyclic moiety located at the 1′ position of a nucleotide sugar moiety in a modified nucleotide, or the equivalent position in a nucleotide sugar moiety substitution, that, when present in a nucleic acid duplex, can be positioned opposite more than one type of base without altering the double helical structure (e.g., the structure of the phosphate backbone). Additionally, the universal base does not destroy the ability of the single stranded nucleic acid in which it resides to duplex to a target nucleic acid. The ability of a single stranded nucleic acid containing a universal base to duplex a target nucleic can be assayed by methods apparent to one in the art (e.g., UV absorbance, circular dichroism, gel shift, single stranded nuclease sensitivity, etc.). Additionally, conditions under which duplex formation is observed may be varied to determine duplex stability or formation, e.g., temperature, as melting temperature (Tm) correlates with the stability of nucleic acid duplexes. Compared to a reference single stranded nucleic acid that is exactly complementary to a target nucleic acid, the single stranded nucleic acid containing a universal base forms a duplex with the target nucleic acid that has a lower Tm than a duplex formed with the complementary nucleic acid. However, compared to a reference single stranded nucleic acid in which the universal base has been replaced with a base to generate a single mismatch, the single stranded nucleic acid containing the universal base forms a duplex with the target nucleic acid that has a higher Tm than a duplex formed with the nucleic acid having the mismatched base.

[0090] Some universal bases are capable of base pairing by forming hydrogen bonds between the universal base and all of the bases guanine (G), cytosine (C), adenine (A), thymine (T), and uracil (U) under base pair forming conditions. A universal base is not a base that forms a base pair with only one single complementary base. In a duplex, a universal base may form no hydrogen bonds, one hydrogen bond, or more than one hydrogen bond with each of G, C, A, T, and U opposite to it on the opposite strand of a duplex. Preferably, the universal bases does not interact with the base opposite to it on the opposite strand of a duplex. In a duplex, base pairing between a universal base occurs without altering the double helical structure of the phosphate backbone. A universal base may also interact with bases in adjacent nucleotides on the same nucleic acid strand by stacking interactions. Such stacking interactions stabilize the duplex, especially in situations where the universal base does not form any hydrogen bonds with the base positioned opposite to it on the opposite strand of the duplex. Non-limiting examples of universal-binding nucleotides include inosine, 1-β-D-ribofuranosyl-5-nitroindole, and/or 143-D-ribofuranosyl-3-nitropyrrole (US Pat. Appl. Publ. No. 20070254362 to Quay et al.; Van Aerschot et al., An acyclic 5-nitroindazole nucleoside analogue as ambiguous nucleoside. Nucleic Acids Res. 1995 Nov. 11; 23(21):4363-70; Loakes et al., 3-Nitropyrrole and 5-nitroindole as universal bases in primers for DNA sequencing and PCR. Nucleic Acids Res. 1995 Jul. 11; 23(13):2361-6; Loakes and Brown, 5-Nitroindole as an universal base analogue. Nucleic Acids Res. 1994 Oct. 11; 22(20):4039-43).

[0091] As used herein, “loop” refers to a structure formed by a single strand of a nucleic acid, in which complementary regions that flank a particular single stranded nucleotide region hybridize in a way that the single stranded nucleotide region between the complementary regions is excluded from duplex formation or Watson-Crick base pairing. A loop is a single stranded nucleotide region of any length. Examples of loops include the unpaired nucleotides present in such structures as hairpins, stem loops, or extended loops.

[0092] As used herein, “extended loop” in the context of a dsRNA refers to a single stranded loop and in addition 1, 2, 3, 4, 5, 6 or up to 20 base pairs or duplexes flanking the loop. In an extended loop, nucleotides that flank the loop on the 5′ side form a duplex with nucleotides that flank the loop on the 3′ side. An extended loop may form a hairpin or stem loop.

[0093] As used herein, “tetraloop” in the context of a dsRNA refers to a loop (a single stranded region) consisting of four nucleotides that forms a stable secondary structure that contributes to the stability of an adjacent Watson-Crick hybridized nucleotides. Without being limited to theory, a tetraloop may stabilize an adjacent Watson-Crick base pair by stacking interactions. In addition, interactions among the four nucleotides in a tetraloop include but are not limited to non-Watson-Crick base pairing, stacking interactions, hydrogen bonding, and contact interactions (Cheong et al., Nature 1990 Aug. 16; 346(6285): 680-2; Heus and Pardi, Science 1991 Jul. 12; 253(5016): 191-4). A tetraloop confers an increase in the melting temperature (Tm) of an adjacent duplex that is higher than expected from a simple model loop sequence consisting of four random bases. For example, a tetraloop can confer a melting temperature of at least 55° C. in 10 mM NaHPO₄ to a hairpin comprising a duplex of at least 2 base pairs in length. A tetraloop may contain ribonucleotides, deoxyribonucleotides, modified nucleotides, and combinations thereof. Examples of RNA tetraloops include the UNCG family of tetraloops (e.g., UUCG), the GNRA family of tetraloops (e.g., GAAA), and the CUUG tetraloop. (Woese et al., Proc Natl Acad Sci USA. November; 87(21):8467-71; Antao et al., Nucleic Acids Res. 1991 Nov. 11; 19(21):5901-5). Examples of DNA tetraloops include the d(GNNA) family of tetraloops (e.g., d(GTTA), the d(GNRA)) family of tetraloops, the d(GNAB) family of tetraloops, the d(CNNG) family of tetraloops, the d(TNCG) family of tetraloops (e.g., d(TTCG)). (Nakano et al. Biochemistry, 41 (48), 14281-14292, 2002.; SHINJI et al. Nippon Kagakkai Koen Yokoshu VOL. 78th; NO. 2; PAGE. 731 (2000).)

[0094] As used herein, the term “siRNA” refers to a double stranded nucleic acid in which each strand comprises RNA, RNA analog(s) or RNA and DNA. The siRNA comprises between 19 and 23 nucleotides or comprises 21 nucleotides. The siRNA typically has 2 bp overhangs on the 3′ ends of each strand such that the duplex region in the siRNA comprises 17-21 nucleotides, or 19 nucleotides. Typically, the antisense strand of the siRNA is sufficiently complementary with the target sequence of the EGFR gene/RNA.

[0095] An anti-EGFR DsiRNA of the instant invention possesses strand lengths of at least 25 nucleotides. Accordingly, in certain embodiments, an anti-EGFR DsiRNA contains one oligonucleotide sequence, a first sequence, that is at least 25 nucleotides in length and no longer than 35 or up to 50 or more nucleotides. This sequence of RNA can be between 26 and 35, 26 and 34, 26 and 33, 26 and 32, 26 and 31, 26 and 30, and 26 and 29 nucleotides in length. This sequence can be 27 or 28 nucleotides in length or 27 nucleotides in length. The second sequence of the DsiRNA agent can be a sequence that anneals to the first sequence under biological conditions, such as within the cytoplasm of a eukaryotic cell. Generally, the second oligonucleotide sequence will have at least 19 complementary base pairs with the first oligonucleotide sequence, more typically the second oligonucleotide sequence will have 21 or more complementary base pairs, or 25 or more complementary base pairs with the first oligonucleotide sequence. In one embodiment, the second sequence is the same length as the first sequence, and the DsiRNA agent is blunt ended. In another embodiment, the ends of the DsiRNA agent have one or more overhangs.

[0096] In certain embodiments, the first and second oligonucleotide sequences of the DsiRNA agent exist on separate oligonucleotide strands that can be and typically are chemically synthesized. In some embodiments, both strands are between 26 and 35 nucleotides in length. In other embodiments, both strands are between 25 and 30 or 26 and 30 nucleotides in length. In one embodiment, both strands are 27 nucleotides in length, are completely complementary and have blunt ends. In certain embodiments of the instant invention, the first and second sequences of an anti-EGFR DsiRNA exist on separate RNA oligonucleotides (strands). In one embodiment, one or both oligonucleotide strands are capable of serving as a substrate for Dicer. In other embodiments, at least one modification is present that promotes Dicer to bind to the double-stranded RNA structure in an orientation that maximizes the double-stranded RNA structure's effectiveness in inhibiting gene expression. In certain embodiments of the instant invention, the anti-EGFR DsiRNA agent is comprised of two oligonucleotide strands of differing lengths, with the anti-EGFR DsiRNA possessing a blunt end at the 3′ terminus of a first strand (sense strand) and a 3′ overhang at the 3′ terminus of a second strand (antisense strand). The DsiRNA can also contain one or more deoxyribonucleic acid (DNA) base substitutions.

[0097] Suitable DsiRNA compositions that contain two separate oligonucleotides can be chemically linked outside their annealing region by chemical linking groups. Many suitable chemical linking groups are known in the art and can be used. Suitable groups will not block Dicer activity on the DsiRNA and will not interfere with the directed destruction of the RNA transcribed from the target gene. Alternatively, the two separate oligonucleotides can be linked by a third oligonucleotide such that a hairpin structure is produced upon annealing of the two oligonucleotides making up the DsiRNA composition. The hairpin structure will not block Dicer activity on the DsiRNA and will not interfere with the directed destruction of the target RNA.

[0098] As used herein, a dsRNA, e.g., DsiRNA or siRNA, having a sequence “sufficiently complementary” to a target RNA or cDNA sequence (e.g., EGFR mRNA) means that the dsRNA has a sequence sufficient to trigger the destruction of the target RNA (where a cDNA sequence is recited, the RNA sequence corresponding to the recited cDNA sequence) by the RNAi machinery (e.g., the RISC complex) or process. For example, a dsRNA that is “sufficiently complementary” to a target RNA or cDNA sequence to trigger the destruction of the target RNA by the RNAi machinery or process can be identified as a dsRNA that causes a detectable reduction in the level of the target RNA in an appropriate assay of dsRNA activity (e.g., an in vitro assay as described in Example 2 below), or, in further examples, a dsRNA that is sufficiently complementary to a target RNA or cDNA sequence to trigger the destruction of the target RNA by the RNAi machinery or process can be identified as a dsRNA that produces at least a 5%, at least a 10%, at least a 15%, at least a 20%, at least a 25%, at least a 30%, at least a 35%, at least a 40%, at least a 45%, at least a 50%, at least a 55%, at least a 60%, at least a 65%, at least a 70%, at least a 75%, at least a 80%, at least a 85%, at least a 90%, at least a 95%, at least a 98% or at least a 99% reduction in the level of the target RNA in an appropriate assay of dsRNA activity. In additional examples, a dsRNA that is sufficiently complementary to a target RNA or cDNA sequence to trigger the destruction of the target RNA by the RNAi machinery or process can be identified based upon assessment of the duration of a certain level of inhibitory activity with respect to the target RNA or protein levels in a cell or organism. For example, a dsRNA that is sufficiently complementary to a target RNA or cDNA sequence to trigger the destruction of the target RNA by the RNAi machinery or process can be identified as a dsRNA capable of reducing target mRNA levels by at least 20% at least 48 hours post-administration of said dsRNA to a cell or organism. Preferably, a dsRNA that is sufficiently complementary to a target RNA or cDNA sequence to trigger the destruction of the target RNA by the RNAi machinery or process is identified as a dsRNA capable of reducing target mRNA levels by at least 40% at least 72 hours post-administration of said dsRNA to a cell or organism, by at least 40% at least four, five or seven days post-administration of said dsRNA to a cell or organism, by at least 50% at least 48 hours post-administration of said dsRNA to a cell or organism, by at least 50% at least 72 hours post-administration of said dsRNA to a cell or organism, by at least 50% at least four, five or seven days post-administration of said dsRNA to a cell or organism, by at least 80% at least 48 hours post-administration of said dsRNA to a cell or organism, by at least 80% at least 72 hours post-administration of said dsRNA to a cell or organism, or by at least 80% at least four, five or seven days post-administration of said dsRNA to a cell or organism.

[0099] The dsRNA molecule can be designed such that every residue of the antisense strand is complementary to a residue in the target molecule. Alternatively, substitutions can be made within the molecule to increase stability and/or enhance processing activity of said molecule. Substitutions can be made within the strand or can be made to residues at the ends of the strand. In certain embodiments, substitutions and/or modifications are made at specific residues within a DsiRNA agent. Such substitutions and/or modifications can include, e.g., deoxy-modifications at one or more residues of positions 1, 2 and 3 when numbering from the 3′ terminal position of the sense strand of a DsiRNA agent; and introduction of 2′-β-alkyl (e.g., 2′-O-methyl) modifications at the 3′ terminal residue of the antisense strand of DsiRNA agents, with such modifications also being performed at overhang positions of the 3′ portion of the antisense strand and at alternating residues of the antisense strand of the DsiRNA that are included within the region of a DsiRNA agent that is processed to form an active siRNA agent. The preceding modifications are offered as exemplary, and are not intended to be limiting in any manner. Further consideration of the structure of preferred DsiRNA agents, including further description of the modifications and substitutions that can be performed upon the anti-EGFR DsiRNA agents of the instant invention, can be found below.

[0100] Where a first sequence is referred to as “substantially complementary” with respect to a second sequence herein, the two sequences can be fully complementary, or they may form one or more, but generally not more than 4, 3 or 2 mismatched base pairs upon hybridization, while retaining the ability to hybridize under the conditions most relevant to their ultimate application. However, where two oligonucleotides are designed to form, upon hybridization, one or more single stranded overhangs, such overhangs shall not be regarded as mismatches with regard to the determination of complementarity. For example, a dsRNA comprising one oligonucleotide 21 nucleotides in length and another oligonucleotide 23 nucleotides in length, wherein the longer oligonucleotide comprises a sequence of 21 nucleotides that is fully complementary to the shorter oligonucleotide, may yet be referred to as “fully complementary” for the purposes of the invention.

[0101] The term “double-stranded RNA” or “dsRNA”, as used herein, refers to a complex of ribonucleic acid molecules, having a duplex structure comprising two anti-parallel and substantially complementary, as defined above, nucleic acid strands. The two strands forming the duplex structure may be different portions of one larger RNA molecule, or they may be separate RNA molecules. Where separate RNA molecules, such dsRNA are often referred to as siRNA (“short interfering RNA”) or DsiRNA (“Dicer substrate siRNAs”). Where the two strands are part of one larger molecule, and therefore are connected by an uninterrupted chain of nucleotides between the 3′-end of one strand and the 5′ end of the respective other strand forming the duplex structure, the connecting RNA chain is referred to as a “hairpin loop”, “short hairpin RNA” or “shRNA”. Where the two strands are connected covalently by means other than an uninterrupted chain of nucleotides between the 3′-end of one strand and the 5′ end of the respective other strand forming the duplex structure, the connecting structure is referred to as a “linker”. The RNA strands may have the same or a different number of nucleotides. The maximum number of base pairs is the number of nucleotides in the shortest strand of the dsRNA minus any overhangs that are present in the duplex. In addition to the duplex structure, a dsRNA may comprise one or more nucleotide overhangs. In addition, as used herein, “dsRNA” may include chemical modifications to ribonucleotides, internucleoside linkages, end-groups, caps, and conjugated moieties, including substantial modifications at multiple nucleotides and including all types of modifications disclosed herein or known in the art. Any such modifications, as used in an siRNA- or DsiRNA-type molecule, are encompassed by “dsRNA” for the purposes of this specification and claims.

[0102] The phrase “duplex region” refers to the region in two complementary or substantially complementary oligonucleotides that form base pairs with one another, either by Watson-Crick base pairing or other manner that allows for a duplex between oligonucleotide strands that are complementary or substantially complementary. For example, an oligonucleotide strand having 21 nucleotide units can base pair with another oligonucleotide of 21 nucleotide units, yet only 19 bases on each strand are complementary or substantially complementary, such that the “duplex region” consists of 19 base pairs. The remaining base pairs may, for example, exist as 5′ and 3′ overhangs. Further, within the duplex region, 100% complementarity is not required; substantial complementarity is allowable within a duplex region. Substantial complementarity refers to complementarity between the strands such that they are capable of annealing under biological conditions. Techniques to empirically determine if two strands are capable of annealing under biological conditions are well know in the art. Alternatively, two strands can be synthesized and added together under biological conditions to determine if they anneal to one another.

[0103] Single-stranded nucleic acids that base pair over a number of bases are said to “hybridize.” Hybridization is typically determined under physiological or biologically relevant conditions (e.g., intracellular: pH 7.2, 140 mM potassium ion; extracellular pH 7.4, 145 mM sodium ion). Hybridization conditions generally contain a monovalent cation and biologically acceptable buffer and may or may not contain a divalent cation, complex anions, e.g. gluconate from potassium gluconate, uncharged species such as sucrose, and inert polymers to reduce the activity of water in the sample, e.g. PEG. Such conditions include conditions under which base pairs can form.

[0104] Hybridization is measured by the temperature required to dissociate single stranded nucleic acids forming a duplex, i.e., (the melting temperature; Tm). Hybridization conditions are also conditions under which base pairs can form. Various conditions of stringency can be used to determine hybridization (see, e.g., Wahl, G. M. and S. L. Berger (1987 Methods Enzymol. 152:399; Kimmel, A. R. (1987) Methods Enzymol. 152:507). Stringent temperature conditions will ordinarily include temperatures of at least about 30° C., more preferably of at least about 37° C., and most preferably of at least about 42° C. The hybridization temperature for hybrids anticipated to be less than 50 base pairs in length should be 5-10° C. less than the melting temperature (Tm) of the hybrid, where Tm is determined according to the following equations. For hybrids less than 18 base pairs in length, Tm(° C.)=2(# of A+T bases)+4(# of G+C bases). For hybrids between 18 and 49 base pairs in length, Tm(° C.)=81.5+16.6(log 10[Na+])+0.41 (% G+C)−(600/N), where N is the number of bases in the hybrid, and [Na+] is the concentration of sodium ions in the hybridization buffer ([Na+] for 1x SSC=0.165 M). For example, a hybridization determination buffer is shown in Table 1.

TABLE 1

| | | | | | | | To make 50 | |
|---|---|---|---|---|---|---|---|---|
| | final conc. | | Vender | Cat# | Lot# | m.w./Stock | mL solution | |
| NaCl | 100 | mM | Sigma | S-5150 | 41K8934 | 5M | 1 | mL |
| KCl | 80 | mM | Sigma | P-9541 | 70K0002 | 74.55 | 0.298 | g |
| MgCl₂ | 8 | mM | Sigma | M-1028 | 120K8933 | 1M | 0.4 | mL |
| sucrose | 2% | w/v | Fisher | BP220-212 | 907105 | 342.3 | 1 | g |
| Tris-HCl | 16 | mM | Fisher | BP1757-500 | 12419 | 1M | 0.8 | mL |
| NaH₂PO₄ | 1 | mM | Sigma | S-3193 | 52H-029515 | 120.0 | 0.006 | g |
| EDTA | 0.02 | mM | Sigma | E-7889 | 110K89271 | 0.5M | 2 | μL |

| | | | | | |
|---|---|---|---|---|---|
| H₂O | Sigma | W-4502 | 51K2359 | to 50 | mL |

| | |
|---|---|
| pH = 7.0 at 20° C. | adjust with HCl |

[0105] Useful variations on hybridization conditions will be readily apparent to those skilled in the art. Hybridization techniques are well known to those skilled in the art and are described, for example, in Benton and Davis (Science 196:180, 1977); Grunstein and Hogness (Proc. Natl. Acad. Sci., USA 72:3961, 1975); Ausubel et al. (Current Protocols in Molecular Biology, Wiley Interscience, New York, 2001); Berger and Kimmel (Antisense to Molecular Cloning Techniques, 1987, Academic Press, New York); and Sambrook et al., Molecular Cloning: A Laboratory Manual, Cold Spring Harbor Laboratory Press, New York.

[0106] As used herein, “oligonucleotide strand” is a single stranded nucleic acid molecule. An oligonucleotide may comprise ribonucleotides, deoxyribonucleotides, modified nucleotides (e.g., nucleotides with 2′ modifications, synthetic base analogs, etc.) or combinations thereof. Such modified oligonucleotides can be preferred over native forms because of properties such as, for example, enhanced cellular uptake and increased stability in the presence of nucleases.

[0107] As used herein, the term “ribonucleotide” encompasses natural and synthetic, unmodified and modified ribonucleotides. Modifications include changes to the sugar moiety, to the base moiety and/or to the linkages between ribonucleotides in the oligonucleotide. As used herein, the term “ribonucleotide” specifically excludes a deoxyribonucleotide, which is a nucleotide possessing a single proton group at the 2′ ribose ring position.

[0108] As used herein, the term “deoxyribonucleotide” encompasses natural and synthetic, unmodified and modified deoxyribonucleotides. Modifications include changes to the sugar moiety, to the base moiety and/or to the linkages between deoxyribonucleotide in the oligonucleotide. As used herein, the term “deoxyribonucleotide” also includes a modified ribonucleotide that does not permit Dicer cleavage of a dsRNA agent, e.g., a 2′-O-methyl ribonucleotide, a phosphorothioate-modified ribonucleotide residue, etc., that does not permit Dicer cleavage to occur at a bond of such a residue.

[0109] As used herein, the term “PS-NA” refers to a phosphorothioate-modified nucleotide residue. The term “PS-NA” therefore encompasses both phosphorothioate-modified ribonucleotides (“PS-RNAs”) and phosphorothioate-modified deoxyribonucleotides (“PS-DNAs”).

[0110] As used herein, “Dicer” refers to an endoribonuclease in the RNase III family that cleaves a dsRNA or dsRNA-containing molecule, e.g., double-stranded RNA (dsRNA) or pre-microRNA (miRNA), into double-stranded nucleic acid fragments 19-25 nucleotides long, usually with a two-base overhang on the 3′ end. With respect to certain dsRNAs of the invention (e.g., “DsiRNAs”), the duplex formed by a dsRNA region of an agent of the invention is recognized by Dicer and is a Dicer substrate on at least one strand of the duplex. Dicer catalyzes the first step in the RNA interference pathway, which consequently results in the degradation of a target RNA. The protein sequence of human Dicer is provided at the NCBI database under accession number NP_{—}085124, hereby incorporated by reference.

[0111] Dicer “cleavage” can be determined as follows (e.g., see Collingwood et al., Oligonucleotides 18:187-200 (2008)). In a Dicer cleavage assay, RNA duplexes (100 pmol) are incubated in 20 μL of 20 mM Tris pH 8.0, 200 mM NaCl, 2.5 mM MgC12 with or without 1 unit of recombinant human Dicer (Stratagene, La Jolla, Calif.) at 37° C. for 18-24 hours. Samples are desalted using a Performa SR 96-well plate (Edge Biosystems, Gaithersburg, Md.). Electrospray-ionization liquid chromatography mass spectroscopy (ESI-LCMS) of duplex RNAs pre- and post-treatment with Dicer is done using an Oligo HTCS system (Novatia, Princeton, N.J.; Hail et al., 2004), which consists of a ThermoFinnigan TSQ7000, Xcalibur data system, ProMass data processing software and Paradigm MS4 HPLC (Michrom BioResources, Auburn, Calif.). In this assay, Dicer cleavage occurs where at least 5%, 10%, 20%, 30%, 40%, 50%, 60%, 70%, 80%, 90%, 95%, or even 100% of the Dicer substrate dsRNA, (i.e., 25-30 bp, dsRNA, preferably 26-30 bp dsRNA) is cleaved to a shorter dsRNA (e.g., 19-23 bp dsRNA, preferably, 21-23 bp dsRNA).

[0112] As used herein, “Dicer cleavage site” refers to the sites at which Dicer cleaves a dsRNA (e.g., the dsRNA region of a DsiRNA agent of the invention). Dicer contains two RNase III domains which typically cleave both the sense and antisense strands of a dsRNA. The average distance between the RNase III domains and the PAZ domain determines the length of the short double-stranded nucleic acid fragments it produces and this distance can vary (Macrae et al. (2006) Science 311: 195-8). As shown in FIG. 1, Dicer is projected to cleave certain double-stranded ribonucleic acids of the instant invention that possess an antisense strand having a 2 nucleotide 3′ overhang at a site between the 21^{St} and 22^{nd} nucleotides removed from the 3′ terminus of the antisense strand, and at a corresponding site between the 21^{st} and 22^{nd} nucleotides removed from the 5′ terminus of the sense strand. The projected and/or prevalent Dicer cleavage site(s) for dsRNA molecules distinct from those depicted in FIG. 1 may be similarly identified via art-recognized methods, including those described in Macrae et al. While the Dicer cleavage events depicted in FIG. 1 generate 21 nucleotide siRNAs, it is noted that Dicer cleavage of a dsRNA (e.g., DsiRNA) can result in generation of Dicer-processed siRNA lengths of 19 to 23 nucleotides in length. Indeed, in certain embodiments, a double-stranded DNA region may be included within a dsRNA for purpose of directing prevalent Dicer excision of a typically non-preferred 19mer or 20mer siRNA, rather than a 21mer.

[0113] As used herein, “overhang” refers to unpaired nucleotides, in the context of a duplex having one or more free ends at the 5′ terminus or 3′ terminus of a dsRNA. In certain embodiments, the overhang is a 3′ or 5′ overhang on the antisense strand or sense strand. In some embodiments, the overhang is a 3′ overhang having a length of between one and six nucleotides, optionally one to five, one to four, one to three, one to two, two to six, two to five, two to four, two to three, three to six, three to five, three to four, four to six, four to five, five to six nucleotides, or one, two, three, four, five or six nucleotides. “Blunt” or “blunt end” means that there are no unpaired nucleotides at that end of the dsRNA, i.e., no nucleotide overhang. For clarity, chemical caps or non-nucleotide chemical moieties conjugated to the 3′ end or 5′ end of an siRNA are not considered in determining whether an siRNA has an overhang or is blunt ended. In certain embodiments, the invention provides a dsRNA molecule for inhibiting the expression of the EGFR target gene in a cell or mammal, wherein the dsRNA comprises an antisense strand comprising a region of complementarity which is complementary to at least a part of an mRNA formed in the expression of the EGFR target gene, and wherein the region of complementarity is less than 35 nucleotides in length, optionally 19-24 nucleotides in length or 25-30 nucleotides in length, and wherein the dsRNA, upon contact with a cell expressing the EGFR target gene, inhibits the expression of the EGFR target gene by at least 10%, 25%, or 40%.

[0114] A dsRNA of the invention comprises two RNA strands that are sufficiently complementary to hybridize to form a duplex structure. One strand of the dsRNA (the antisense strand) comprises a region of complementarity that is substantially complementary, and generally fully complementary, to a target sequence, derived from the sequence of an mRNA formed during the expression of the EGFR target gene, the other strand (the sense strand) comprises a region which is complementary to the antisense strand, such that the two strands hybridize and form a duplex structure when combined under suitable conditions. Generally, the duplex structure is between 15 and 35, optionally between 25 and 30, between 26 and 30, between 18 and 25, between 19 and 24, or between 19 and 21 base pairs in length. Similarly, the region of complementarity to the target sequence is between 15 and 35, optionally between 18 and 30, between 25 and 30, between 19 and 24, or between 19 and 21 nucleotides in length. The dsRNA of the invention may further comprise one or more single-stranded nucleotide overhang(s). It has been identified that dsRNAs comprising duplex structures of between 15 and 35 base pairs in length can be effective in inducing RNA interference, including DsiRNAs (generally of at least 25 base pairs in length) and siRNAs (in certain embodiments, duplex structures of siRNAs are between 20 and 23, and optionally, specifically 21 base pairs (Elbashir et al., EMBO 20: 6877-6888)). It has also been identified that dsRNAs possessing duplexes shorter than 20 base pairs can be effective as well (e.g., 15, 16, 17, 18 or 19 base pair duplexes). In certain embodiments, the dsRNAs of the invention can comprise at least one strand of a length of 19 nucleotides or more. In certain embodiments, it can be reasonably expected that shorter dsRNAs comprising a sequence complementary to one of the sequences of Table 6, minus only a few nucleotides on one or both ends may be similarly effective as compared to the dsRNAs described above and in Tables 2-5 and 7-10. Hence, dsRNAs comprising a partial sequence of at least 15, 16, 17, 18, 19, 20, or more contiguous nucleotides sufficiently complementary to one of the sequences of Table 6, and differing in their ability to inhibit the expression of the EGFR target gene in an assay as described herein by not more than 5, 10, 15, 20, 25, or 30% inhibition from a dsRNA comprising the full sequence, are contemplated by the invention. In one embodiment, at least one end of the dsRNA has a single-stranded nucleotide overhang of 1 to 5, optionally 1 to 4, in certain embodiments, 1 or 2 nucleotides. Certain dsRNA structures having at least one nucleotide overhang possess superior inhibitory properties as compared to counterparts possessing base-paired blunt ends at both ends of the dsRNA molecule.

[0115] As used herein, the term “RNA processing” refers to processing activities performed by components of the siRNA, miRNA or RNase H pathways (e.g., Drosha, Dicer, Argonaute2 or other RISC endoribonucleases, and RNaseH), which are described in greater detail below (see “RNA Processing” section below). The term is explicitly distinguished from the post-transcriptional processes of 5′ capping of RNA and degradation of RNA via non-RISC- or non-RNase H-mediated processes. Such “degradation” of an RNA can take several forms, e.g. deadenylation (removal of a 3′ poly(A) tail), and/or nuclease digestion of part or all of the body of the RNA by one or more of several endo- or exo-nucleases (e.g., RNase III, RNase P, RNase T1, RNase A (1, 2, 3, 4/5), oligonucleotidase, etc.).

[0116] By “homologous sequence” is meant, a nucleotide sequence that is shared by one or more polynucleotide sequences, such as genes, gene transcripts and/or non-coding polynucleotides. For example, a homologous sequence can be a nucleotide sequence that is shared by two or more genes encoding related but different proteins, such as different members of a gene family, different protein epitopes, different protein isoforms or completely divergent genes, such as a cytokine and its corresponding receptors. A homologous sequence can be a nucleotide sequence that is shared by two or more non-coding polynucleotides, such as noncoding DNA or RNA, regulatory sequences, introns, and sites of transcriptional control or regulation. Homologous sequences can also include conserved sequence regions shared by more than one polynucleotide sequence. Homology does not need to be perfect homology (e.g., 100%), as partially homologous sequences are also contemplated by the instant invention (e.g., 99%, 98%, 97%, 96%, 95%, 94%, 93%, 92%, 91%, 90%, 89%, 88%, 87%, 86%, 85%, 84%, 83%, 82%, 81%, 80% etc.). Indeed, design and use of the dsRNA agents of the instant invention contemplates the possibility of using such dsRNA agents not only against target RNAs of EGFR possessing perfect complementarity with the presently described dsRNA agents, but also against target EGFR RNAs possessing sequences that are, e.g., only 99%, 98%, 97%, 96%, 95%, 94%, 93%, 92%, 91%, 90%, 89%, 88%, 87%, 86%, 85%, 84%, 83%, 82%, 81%, 80% etc. complementary to said dsRNA agents. Similarly, it is contemplated that the presently described dsRNA agents of the instant invention might be readily altered by the skilled artisan to enhance the extent of complementarity between said dsRNA agents and a target EGFR RNA, e.g., of a specific allelic variant of EGFR (e.g., an allele of enhanced therapeutic interest). Indeed, dsRNA agent sequences with insertions, deletions, and single point mutations relative to the target EGFR sequence can also be effective for inhibition. Alternatively, dsRNA agent sequences with nucleotide analog substitutions or insertions can be effective for inhibition.

[0117] Sequence identity may be determined by sequence comparison and alignment algorithms known in the art. To determine the percent identity of two nucleic acid sequences (or of two amino acid sequences), the sequences are aligned for comparison purposes (e.g., gaps can be introduced in the first sequence or second sequence for optimal alignment). The nucleotides (or amino acid residues) at corresponding nucleotide (or amino acid) positions are then compared. When a position in the first sequence is occupied by the same residue as the corresponding position in the second sequence, then the molecules are identical at that position. The percent identity between the two sequences is a function of the number of identical positions shared by the sequences (i.e., % homology=# of identical positions/total # of positions×100), optionally penalizing the score for the number of gaps introduced and/or length of gaps introduced.

[0118] The comparison of sequences and determination of percent identity between two sequences can be accomplished using a mathematical algorithm. In one embodiment, the alignment generated over a certain portion of the sequence aligned having sufficient identity but not over portions having low degree of identity (i.e., a local alignment). A preferred, non-limiting example of a local alignment algorithm utilized for the comparison of sequences is the algorithm of Karlin and Altschul (1990) Proc. Natl. Acad. Sci. USA 87:2264-68, modified as in Karlin and Altschul (1993) Proc. Natl. Acad. Sci. USA 90:5873-77. Such an algorithm is incorporated into the BLAST programs (version 2.0) of Altschul, et al. (1990) J. Mol. Biol. 215:403-10.

[0119] In another embodiment, a gapped alignment the alignment is optimized is formed by introducing appropriate gaps, and percent identity is determined over the length of the aligned sequences (i.e., a gapped alignment). To obtain gapped alignments for comparison purposes, Gapped BLAST can be utilized as described in Altschul et al., (1997) Nucleic Acids Res. 25(17):3389-3402. In another embodiment, a global alignment the alignment is optimizedis formed by introducing appropriate gaps, and percent identity is determined over the entire length of the sequences aligned. (i.e., a global alignment). A preferred, non-limiting example of a mathematical algorithm utilized for the global comparison of sequences is the algorithm of Myers and Miller, CABIOS (1989). Such an algorithm is incorporated into the ALIGN program (version 2.0) which is part of the GCG sequence alignment software package. When utilizing the ALIGN program for comparing amino acid sequences, a PAM120 weight residue table, a gap length penalty of 12, and a gap penalty of 4 can be used.

[0120] Greater than 80% sequence identity, e.g., 80%, 81%, 82%, 83%, 84%, 85%, 86%, 87%, 88%, 89%, 90%, 91%, 92%, 93%, 94%, 95%, 96%, 97%, 98%, 99% or even 100% sequence identity, between the dsRNA antisense strand and the portion of the EGFR RNA sequence is preferred. Alternatively, the dsRNA may be defined functionally as a nucleotide sequence (or oligonucleotide sequence) that is capable of hybridizing with a portion of the EGFR RNA (e.g., 400 mM NaCl, 40 mM PIPES pH 6.4, 1 mM EDTA, 50° C. or 70° C. hybridization for 12-16 hours; followed by washing). Additional preferred hybridization conditions include hybridization at 70° C. in 1x SSC or 50° C. in 1x SSC, 50% formamide followed by washing at 70° C. in 0.3×SSC or hybridization at 70° C. in 4×SSC or 50° C. in 4×SSC, 50% formamide followed by washing at 67° C. in 1x SSC. The hybridization temperature for hybrids anticipated to be less than 50 base pairs in length should be 5-10° C. less than the melting temperature (Tm) of the hybrid, where Tm is determined according to the following equations. For hybrids less than 18 base pairs in length, Tm(° C.)=2(# of A+T bases)+4(# of G+C bases). For hybrids between 18 and 49 base pairs in length, Tm(° C.)=81.5+16.6(log 10[Na+])+0.41 (% G+C)−(600/N), where N is the number of bases in the hybrid, and [Na+] is the concentration of sodium ions in the hybridization buffer ([Na+] for 1x SSC=0.165 M). Additional examples of stringency conditions for polynucleotide hybridization are provided in Sambrook, J., E. F. Fritsch, and T. Maniatis, 1989, Molecular Cloning: A Laboratory Manual, Cold Spring Harbor Laboratory Press, Cold Spring Harbor, N.Y., chapters 9 and 11, and Current Protocols in Molecular Biology, 1995, F. M. Ausubel et al., eds., John Wiley & Sons, Inc., sections 2.10 and 6.3-6.4. The length of the identical nucleotide sequences may be at least 10, 12, 15, 17, 20, 22, 25, 27 or 30 bases.

[0121] By “conserved sequence region” is meant, a nucleotide sequence of one or more regions in a polynucleotide does not vary significantly between generations or from one biological system, subject, or organism to another biological system, subject, or organism. The polynucleotide can include both coding and non-coding DNA and RNA.

[0122] By “sense region” is meant a nucleotide sequence of a dsRNA molecule having complementarity to an antisense region of the dsRNA molecule. In addition, the sense region of a dsRNA molecule can comprise a nucleic acid sequence having homology with a target nucleic acid sequence.

[0123] By “antisense region” is meant a nucleotide sequence of a dsRNA molecule having complementarity to a target nucleic acid sequence. In addition, the antisense region of a dsRNA molecule comprises a nucleic acid sequence having complementarity to a sense region of the dsRNA molecule.

[0124] As used herein, “antisense strand” refers to a single stranded nucleic acid molecule which has a sequence complementary to that of a target RNA. When the antisense strand contains modified nucleotides with base analogs, it is not necessarily complementary over its entire length, but must at least hybridize with a target RNA.

[0125] As used herein, “sense strand” refers to a single stranded nucleic acid molecule which has a sequence complementary to that of an antisense strand. When the antisense strand contains modified nucleotides with base analogs, the sense strand need not be complementary over the entire length of the antisense strand, but must at least duplex with the antisense strand.

[0126] As used herein, “guide strand” refers to a single stranded nucleic acid molecule of a dsRNA or dsRNA-containing molecule, which has a sequence sufficiently complementary to that of a target RNA to result in RNA interference. After cleavage of the dsRNA or dsRNA-containing molecule by Dicer, a fragment of the guide strand remains associated with RISC, binds a target RNA as a component of the RISC complex, and promotes cleavage of a target RNA by RISC. As used herein, the guide strand does not necessarily refer to a continuous single stranded nucleic acid and may comprise a discontinuity, preferably at a site that is cleaved by Dicer. A guide strand is an antisense strand.

[0127] As used herein, “passenger strand” refers to an oligonucleotide strand of a dsRNA or dsRNA-containing molecule, which has a sequence that is complementary to that of the guide strand. As used herein, the passenger strand does not necessarily refer to a continuous single stranded nucleic acid and may comprise a discontinuity, preferably at a site that is cleaved by Dicer. A passenger strand is a sense strand.

[0128] By “target nucleic acid” is meant a nucleic acid sequence whose expression, level or activity is to be modulated. The target nucleic acid can be DNA or RNA. For agents that target EGFR, in certain embodiments, the target nucleic acid is EGFR RNA. EGFR RNA target sites can also interchangeably be referenced by corresponding cDNA sequences. Levels of EGFR may also be targeted via targeting of upstream effectors of EGFR, or the effects of modulated or misregulated EGFR may also be modulated by targeting of molecules downstream of EGFR in the EGFR signalling pathway.

[0129] By “complementarity” is meant that a nucleic acid can form hydrogen bond(s) with another nucleic acid sequence by either traditional Watson-Crick or other non-traditional types. In reference to the nucleic molecules of the present invention, the binding free energy for a nucleic acid molecule with its complementary sequence is sufficient to allow the relevant function of the nucleic acid to proceed, e.g., RNAi activity. Determination of binding free energies for nucleic acid molecules is well known in the art (see, e.g., Turner et al., 1987, CSH Symp. Quant. Biol. LII pp. 123-133; Frier et al., 1986, Proc. Nat. Acad. Sci. USA 83:9373-9377; Turner et al., 1987, J. Am. Chem. Soc. 109:3783-3785). A percent complementarity indicates the percentage of contiguous residues in a nucleic acid molecule that can form hydrogen bonds (e.g., Watson-Crick base pairing) with a second nucleic acid sequence (e.g., 5, 6, 7, 8, 9, or 10 nucleotides out of a total of 10 nucleotides in the first oligonucleotide being based paired to a second nucleic acid sequence having 10 nucleotides represents 50%, 60%, 70%, 80%, 90%, and 100% complementary respectively). “Perfectly complementary” means that all the contiguous residues of a nucleic acid sequence will hydrogen bond with the same number of contiguous residues in a second nucleic acid sequence. In one embodiment, a dsRNA molecule of the invention comprises 19 to 30 (e.g., 19, 20, 21, 22, 23, 24, 25, 26, 27, 28, 29, or 30 or more) nucleotides that are complementary to one or more target nucleic acid molecules or a portion thereof.

[0130] In one embodiment, dsRNA molecules of the invention that down regulate or reduce EGFR gene expression are used for treating, preventing or reducing EGFR-related diseases or disorders (e.g., cancer) in a subject or organism.

[0131] In one embodiment of the present invention, each sequence of a DsiRNA molecule of the invention is independently 25 to 35 nucleotides in length, in specific embodiments 25, 26, 27, 28, 29, 30, 31, 32, 33, 34 or 35 nucleotides in length. In another embodiment, the DsiRNA duplexes of the invention independently comprise 25 to 30 base pairs (e.g., 25, 26, 27, 28, 29, or 30). In another embodiment, one or more strands of the DsiRNA molecule of the invention independently comprises 19 to 35 nucleotides (e.g., 19, 20, 21, 22, 23, 24, 25, 26, 27, 28, 29, 30, 31, 32, 33, 34 or 35) that are complementary to a target (EGFR) nucleic acid molecule. In certain embodiments, a DsiRNA molecule of the invention possesses a length of duplexed nucleotides between 25 and 34 nucleotides in length (e.g., 25, 26, 27, 28, 29, 30, 31, 32, 33 or 34 nucleotides in length; optionally, all such nucleotides base pair with cognate nucleotides of the opposite strand). (Exemplary DsiRNA molecules of the invention are shown in FIG. 1, and below.

[0132] As used herein “cell” is used in its usual biological sense, and does not refer to an entire multicellular organism, e.g., specifically does not refer to a human. The cell can be present in an organism, e.g., birds, plants and mammals such as humans, cows, sheep, apes, monkeys, swine, dogs, and cats. The cell can be prokaryotic (e.g., bacterial cell) or eukaryotic (e.g., mammalian or plant cell). The cell can be of somatic or germ line origin, totipotent or pluripotent, dividing or non-dividing. The cell can also be derived from or can comprise a gamete or embryo, a stem cell, or a fully differentiated cell. Within certain aspects, the term “cell” refers specifically to mammalian cells, such as human cells, that contain one or more isolated dsRNA molecules of the present disclosure. In particular aspects, a cell processes dsRNAs or dsRNA-containing molecules resulting in RNA intereference of target nucleic acids, and contains proteins and protein complexes required for RNAi, e.g., Dicer and RISC.

[0133] In certain embodiments, dsRNAs of the invention are Dicer substrate siRNAs (“DsiRNAs”). DsiRNAs can possess certain advantages as compared to inhibitory nucleic acids that are not dicer substrates (“non-DsiRNAs”). Such advantages include, but are not limited to, enhanced duration of effect of a DsiRNA relative to a non-DsiRNA, as well as enhanced inhibitory activity of a DsiRNA as compared to a non-DsiRNA (e.g., a 19-23mer siRNA) when each inhibitory nucleic acid is suitably formulated and assessed for inhibitory activity in a mammalian cell at the same concentration (in this latter scenario, the DsiRNA would be identified as more potent than the non-DsiRNA). Detection of the enhanced potency of a DsiRNA relative to a non-DsiRNA is often most readily achieved at a formulated concentration (e.g., transfection concentration of the dsRNA) that results in the DsiRNA eliciting approximately 30-70% knockdown activity upon a target RNA (e.g., a mRNA). For active DsiRNAs, such levels of knockdown activity are most often achieved at in vitro mammalian cell DsiRNA transfection concentrations of 1 nM or less of as suitably formulated, and in certain instances are observed at DsiRNA transfection concentrations of 200 pM or less, 100 pM or less, 50 pM or less, 20 pM or less, 10 pM or less, 5 pM or less, or even 1 pM or less. Indeed, due to the variability among DsiRNAs of the precise concentration at which 30-70% knockdown of a target RNA is observed, construction of an IC50 curve via assessment of the inhibitory activity of DsiRNAs and non-DsiRNAs across a range of effective concentrations is a preferred method for detecting the enhanced potency of a DsiRNA relative to a non-DsiRNA inhibitory agent.

[0134] In certain embodiments, a DsiRNA (in a state as initially formed, prior to dicer cleavage) is more potent at reducing EGFR target gene expression in a mammalian cell than a 19, 20, 21, 22 or 23 base pair sequence that is contained within it. In certain such embodiments, a DsiRNA prior to dicer cleavage is more potent than a 19-21mer contained within it. Optionally, a DsiRNA prior to dicer cleavage is more potent than a 19 base pair duplex contained within it that is synthesized with symmetric dTdT overhangs (thereby forming a siRNA possessing 21 nucleotide strand lengths having dTdT overhangs). In certain embodiments, the DsiRNA is more potent than a 19-23mer siRNA (e.g., a 19 base pair duplex with dTdT overhangs) that targets at least 15 nucleotides of the 21 nucleotide target sequence that is recited for a DsiRNA of the invention (without wishing to be bound by theory, the identity of a such a target site for a DsiRNA is identified via identification of the Ago2 cleavage site for the DsiRNA; once the Ago2 cleavage site of a DsiRNA is determined for a DsiRNA, identification of the Ago2 cleavage site for any other inhibitory dsRNA can be performed and these Ago2 cleavage sites can be aligned, thereby determining the alignment of projected target nucleotide sequences for multiple dsRNAs). In certain related embodiments, the DsiRNA is more potent than a 19-23mer siRNA that targets at least 20 nucleotides of the 21 nucleotide target sequence that is recited for a DsiRNA of the invention. Optionally, the DsiRNA is more potent than a 19-23mer siRNA that targets the same 21 nucleotide target sequence that is recited for a DsiRNA of the invention. In certain embodiments, the DsiRNA is more potent than any 21mer siRNA that targets the same 21 nucleotide target sequence that is recited for a DsiRNA of the invention. Optionally, the DsiRNA is more potent than any 21 or 22mer siRNA that targets the same 21 nucleotide target sequence that is recited for a DsiRNA of the invention. In certain embodiments, the DsiRNA is more potent than any 21, 22 or 23mer siRNA that targets the same 21 nucleotide target sequence that is recited for a DsiRNA of the invention. As noted above, such potency assessments are most effectively performed upon dsRNAs that are suitably formulated (e.g., formulated with an appropriate transfection reagent) at a concentration of 1 nM or less. Optionally, an IC50 assessment is performed to evaluate activity across a range of effective inhibitory concentrations, thereby allowing for robust comparison of the relative potencies of dsRNAs so assayed.

[0135] The dsRNA molecules of the invention are added directly, or can be complexed with lipids (e.g., cationic lipids), packaged within liposomes, or otherwise delivered to target cells or tissues. The nucleic acid or nucleic acid complexes can be locally administered to relevant tissues ex vivo, or in vivo through direct dermal application, transdermal application, or injection, with or without their incorporation in biopolymers. In particular embodiments, the nucleic acid molecules of the invention comprise sequences shown in FIG. 1, and the below exemplary structures. Examples of such nucleic acid molecules consist essentially of sequences defined in these figures and exemplary structures. Furthermore, where such agents are modified in accordance with the below description of modification patterning of DsiRNA agents, chemically modified forms of constructs described in FIG. 1, and the below exemplary structures can be used in all uses described for the DsiRNA agents of FIG. 1, and the below exemplary structures.

[0136] In another aspect, the invention provides mammalian cells containing one or more dsRNA molecules of this invention. The one or more dsRNA molecules can independently be targeted to the same or different sites.

[0137] By “RNA” is meant a molecule comprising at least one, and preferably at least 4, 8 and 12 ribonucleotide residues. The at least 4, 8 or 12 RNA residues may be contiguous. By “ribonucleotide” is meant a nucleotide with a hydroxyl group at the 2′ position of a β-D-ribofuranose moiety. The terms include double-stranded RNA, single-stranded RNA, isolated RNA such as partially purified RNA, essentially pure RNA, synthetic RNA, recombinantly produced RNA, as well as altered RNA that differs from naturally occurring RNA by the addition, deletion, substitution and/or alteration of one or more nucleotides. Such alterations can include addition of non-nucleotide material, such as to the end(s) of the dsRNA or internally, for example at one or more nucleotides of the RNA. Nucleotides in the RNA molecules of the instant invention can also comprise non-standard nucleotides, such as non-naturally occurring nucleotides or chemically synthesized nucleotides or deoxynucleotides. These altered RNAs can be referred to as analogs or analogs of naturally-occurring RNA.

[0138] By “subject” is meant an organism, which is a donor or recipient of explanted cells or the cells themselves. “Subject” also refers to an organism to which the dsRNA agents of the invention can be administered. A subject can be a mammal or mammalian cells, including a human or human cells.

[0139] The phrase “pharmaceutically acceptable carrier” refers to a carrier for the administration of a therapeutic agent. Exemplary carriers include saline, buffered saline, dextrose, water, glycerol, ethanol, and combinations thereof. For drugs administered orally, pharmaceutically acceptable carriers include, but are not limited to pharmaceutically acceptable excipients such as inert diluents, disintegrating agents, binding agents, lubricating agents, sweetening agents, flavoring agents, coloring agents and preservatives. Suitable inert diluents include sodium and calcium carbonate, sodium and calcium phosphate, and lactose, while corn starch and alginic acid are suitable disintegrating agents. Binding agents may include starch and gelatin, while the lubricating agent, if present, will generally be magnesium stearate, stearic acid or talc. If desired, the tablets may be coated with a material such as glyceryl monostearate or glyceryl distearate, to delay absorption in the gastrointestinal tract. The pharmaceutically acceptable carrier of the disclosed dsRNA compositions may be micellar structures, such as a liposomes, capsids, capsoids, polymeric nanocapsules, or polymeric microcapsules.

[0140] Polymeric nanocapsules or microcapsules facilitate transport and release of the encapsulated or bound dsRNA into the cell. They include polymeric and monomeric materials, especially including polybutylcyanoacrylate. A summary of materials and fabrication methods has been published (see Kreuter, 1991). The polymeric materials which are formed from monomeric and/or oligomeric precursors in the polymerization/nanoparticle generation step, are per se known from the prior art, as are the molecular weights and molecular weight distribution of the polymeric material which a person skilled in the field of manufacturing nanoparticles may suitably select in accordance with the usual skill.

[0141] Various methodologies of the instant invention include step that involves comparing a value, level, feature, characteristic, property, etc. to a “suitable control”, referred to interchangeably herein as an “appropriate control”. A “suitable control” or “appropriate control” is a control or standard familiar to one of ordinary skill in the art useful for comparison purposes. In one embodiment, a “suitable control” or “appropriate control” is a value, level, feature, characteristic, property, etc. determined prior to performing an RNAi methodology, as described herein. For example, a transcription rate, mRNA level, translation rate, protein level, biological activity, cellular characteristic or property, genotype, phenotype, etc. can be determined prior to introducing an RNA silencing agent (e.g., DsiRNA) of the invention into a cell or organism. In another embodiment, a “suitable control” or “appropriate control” is a value, level, feature, characteristic, property, etc. determined in a cell or organism, e.g., a control or normal cell or organism, exhibiting, for example, normal traits. In yet another embodiment, a “suitable control” or “appropriate control” is a predefined value, level, feature, characteristic, property, etc.

[0142] The term “in vitro” has its art recognized meaning, e.g., involving purified reagents or extracts, e.g., cell extracts. The term “in vivo” also has its art recognized meaning, e.g., involving living cells, e.g., immortalized cells, primary cells, cell lines, and/or cells in an organism.

[0143] “Treatment”, or “treating” as used herein, is defined as the application or administration of a therapeutic agent (e.g., a dsRNA agent or a vector or transgene encoding same) to a patient, or application or administration of a therapeutic agent to an isolated tissue or cell line from a patient, who has a disorder with the purpose to cure, heal, alleviate, relieve, alter, remedy, ameliorate, improve or affect the disease or disorder, or symptoms of the disease or disorder. The term “treatment” or “treating” is also used herein in the context of administering agents prophylactically. The term “effective dose” or “effective dosage” is defined as an amount sufficient to achieve or at least partially achieve the desired effect. The term “therapeutically effective dose” is defined as an amount sufficient to cure or at least partially arrest the disease and its complications in a patient already suffering from the disease. The term “patient” includes human and other mammalian subjects that receive either prophylactic or therapeutic treatment.

### Structures of Anti-EGFR DsiRNA Agents

[0144] In certain embodiments, the anti-EGFR DsiRNA agents of the invention can have the following structures:

[0145] In one such embodiment, the DsiRNA comprises:

5′-XXXXXXXXXXXXXXXXXXXXXXXXX-3′
3′-YXXXXXXXXXXXXXXXXXXXXXXXXX-5′

wherein “X”=RNA and “Y” is an overhang domain comprised of 1-4 RNA monomers that are optionally 2′-O-methyl RNA monomers. In a related embodiment, the DsiRNA comprises:

5′-XXXXXXXXXXXXXXXXXXXXXXXDD-3′
3′-YXXXXXXXXXXXXXXXXXXXXXXXXX-5′

wherein “X”=RNA, “Y” is an overhang domain comprised of 1-4 RNA monomers that are optionally 2′-O-methyl RNA monomers, and “D”=DNA. In one embodiment, the top strand is the sense strand, and the bottom strand is the antisense strand. Alternatively, the bottom strand is the sense strand and the top strand is the antisense strand.

[0146] DsiRNAs of the invention can carry a broad range of modification patterns (e.g., 2′-O-methyl RNA patterns, e.g., within extended DsiRNA agents). Certain modification patterns of the second strand of DsiRNAs of the invention are presented below.

[0147] In one embodiment, the DsiRNA comprises:

5′-XXXXXXXXXXXXXXXXXXXXXXXXX-3′
3′-YXXXXXXXXXXXXXXXXXXXXXXXXX-5′

wherein “X”=RNA, “X”=2′-O-methyl RNA, “Y” is an overhang domain comprised of 1-4 RNA monomers that are optionally 2′-O-methyl RNA monomers and underlined residues are 2′-O-methyl RNA monomers. In a related embodiment, the DsiRNA comprises:

5′-XXXXXXXXXXXXXXXXXXXXXXXDD-3′
3′-YXXXXXXXXXXXXXXXXXXXXXXXXX-5′

wherein “X”=RNA, “X”=2′-O-methyl RNA, “Y” is an overhang domain comprised of 1-4 RNA monomers that are optionally 2′-O-methyl RNA monomers and underlined residues are 2′-O-methyl RNA monomers, and “D”=DNA. The top strand is the sense strand, and the bottom strand is the antisense strand.

[0148] In another such embodiment, the DsiRNA comprises:

5′-XXXXXXXXXXXXXXXXXXXXXXXXX-3′
3′-YXXXXXXXXXXXXXXXXXXXXXXXXX-5′

wherein “X”=RNA, “X”=2′-O-methyl RNA, “Y” is an overhang domain comprised of 1-4 RNA monomers that are optionally 2′-O-methyl RNA monomers and underlined residues are 2′-O-methyl RNA monomers. In a related embodiment, the DsiRNA comprises:

5′-XXXXXXXXXXXXXXXXXXXXXXXDD-3′
3′-YXXXXXXXXXXXXXXXXXXXXXXXXX-5′

wherein “X”=RNA, “X”=2′-O-methyl RNA, “Y” is an overhang domain comprised of 1-4 RNA monomers that are optionally 2′-O-methyl RNA monomers, underlined residues are 2′-O-methyl RNA monomers, and “D”=DNA. The top strand is the sense strand, and the bottom strand is the antisense strand.

[0149] In another such embodiment, the DsiRNA comprises:

5′-XXXXXXXXXXXXXXXXXXXXXXXXX-3′
3′-YXXXXXXXXXXXXXXXXXXXXXXXXX-5′

wherein “X”=RNA, “X”=2′-O-methyl RNA, “Y” is an overhang domain comprised of 1-4 RNA monomers that are optionally 2′-O-methyl RNA monomers and underlined residues are 2′-O-methyl RNA monomers. In a related embodiment, the DsiRNA comprises:

5′-XXXXXXXXXXXXXXXXXXXXXXXDD-3′
3′-YXXXXXXXXXXXXXXXXXXXXXXXXX-5′

wherein “X”=RNA, “X”=2′-O-methyl RNA, “Y” is an overhang domain comprised of 1-4 RNA monomers that are optionally 2′-O-methyl RNA monomers, underlined residues are 2′-O-methyl RNA monomers, and “D”=DNA. The top strand is the sense strand, and the bottom strand is the antisense strand.

[0150] In further embodiments, the DsiRNA comprises:

5′-XXXXXXXXXXXXXXXXXXXXXXXXX-3′
3′-YXXXXXXXXXXXXXXXXXXXXXXXXX-5′

wherein “X”=RNA, “X”=2′-O-methyl RNA, “Y” is an overhang domain comprised of 1-4 RNA monomers that are optionally 2′-O-methyl RNA monomers and underlined residues are 2′-O-methyl RNA monomers. In a related embodiment, the DsiRNA comprises:

5′-XXXXXXXXXXXXXXXXXXXXXXXDD-3′
3′-YXXXXXXXXXXXXXXXXXXXXXXXXX-5′

wherein “X”=RNA, “X”=2′-O-methyl RNA, “Y” is an overhang domain comprised of 1-4 RNA monomers that are optionally 2′-O-methyl RNA monomers, underlined residues are 2′-O-methyl RNA monomers, and “D”=DNA. The top strand is the sense strand, and the bottom strand is the antisense strand. In one related embodiment, the DsiRNA comprises:

5′-XXXXXXXXXXXXXXXXXXXXXXXXX-3′
3′-XXXXXXXXXXXXXXXXXXXXXXXXXXX-5′

wherein “X”=RNA and “X”=2′-O-methyl RNA. In a further related embodiment, the DsiRNA comprises:

5′-XXXXXXXXXXXXXXXXXXXXXXXDD-3′
3′-XXXXXXXXXXXXXXXXXXXXXXXXXXX-5′

wherein “X”=RNA, “X”=2′-O-methyl RNA, and “D”=DNA. The top strand is the sense strand, and the bottom strand is the antisense strand. This modification pattern is also referred to herein as the “AS-M7” or “M7” modification pattern.

[0151] In additional embodiments, the DsiRNA comprises:

5′-XXXXXXXXXXXXXXXXXXXXXXXXX-3′
3′-YXXXXXXXXXXXXXXXXXXXXXXXXX-5′

wherein “X”=RNA, “X”=2′-O-methyl RNA, “Y” is an overhang domain comprised of 1-4 RNA monomers that are optionally 2′-O-methyl RNA monomers and underlined residues are 2′-O-methyl RNA monomers. In a related embodiment, the DsiRNA comprises:

5′-XXXXXXXXXXXXXXXXXXXXXXXDD-3′
3′-YXXXXXXXXXXXXXXXXXXXXXXXXX-5′

wherein “X”=RNA, “X”=2′-O-methyl RNA, “Y” is an overhang domain comprised of 1-4 RNA monomers that are optionally 2′-O-methyl RNA monomers, underlined residues are 2′-O-methyl RNA monomers, and “D”=DNA. The top strand is the sense strand, and the bottom strand is the antisense strand. The top strand is the sense strand, and the bottom strand is the antisense strand. In another related embodiment, the DsiRNA comprises:

5′-XXXXXXXXXXXXXXXXXXXXXXXXX-3′
3′-XXXXXXXXXXXXXXXXXXXXXXXXXXX-5′

wherein “X”=RNA and “X”=2′-O-methyl RNA. The top strand is the sense strand, and the bottom strand is the antisense strand. In a further related embodiment, the DsiRNA comprises:

5′-XXXXXXXXXXXXXXXXXXXXXXXDD-3′
3′-XXXXXXXXXXXXXXXXXXXXXXXXXXX-5′

wherein “X”=RNA, “X”=2′-O-methyl RNA, and “D”=DNA. The top strand is the sense strand, and the bottom strand is the antisense strand. This modification pattern is also referred to herein as the “AS-M6” or “M6” modification pattern.

[0152] In other embodiments, the DsiRNA comprises:

5′-XXXXXXXXXXXXXXXXXXXXXXXXX-3′
3′-YXXXXXXXXXXXXXXXXXXXXXXXXX-5′

wherein “X”=RNA, “X”=2′-O-methyl RNA, “Y” is an overhang domain comprised of 1-4 RNA monomers that are optionally 2′-O-methyl RNA monomers and underlined residues are 2′-O-methyl RNA monomers. The top strand is the sense strand, and the bottom strand is the antisense strand. In a related embodiment, the DsiRNA comprises:

5′-XXXXXXXXXXXXXXXXXXXXXXXDD-3′
3′-YXXXXXXXXXXXXXXXXXXXXXXXXX-5′

wherein “X”=RNA, “X”=2′-O-methyl RNA, “Y” is an overhang domain comprised of 1-4 RNA monomers that are optionally 2′-O-methyl RNA monomers, underlined residues are 2′-O-methyl RNA monomers, and “D”=DNA. The top strand is the sense strand, and the bottom strand is the antisense strand. In one related embodiment, the DsiRNA comprises:

5′-XXXXXXXXXXXXXXXXXXXXXXXXX-3′
3′-XXXXXXXXXXXXXXXXXXXXXXXXXXX-5′

wherein “X”=RNA and “X”=2′-O-methyl RNA. The top strand is the sense strand, and the bottom strand is the antisense strand. In another related embodiment, the DsiRNA comprises:

5′-XXXXXXXXXXXXXXXXXXXXXXXDD-3′
3′-XXXXXXXXXXXXXXXXXXXXXXXXXXX-5′

wherein “X”=RNA, “X”=2′-O-methyl RNA, and “D”=DNA. The top strand is the sense strand, and the bottom strand is the antisense strand. This modification pattern is also referred to herein as the “AS-M5” or “M5” modification pattern.

[0153] In further embodiments, the DsiRNA comprises:

5′-XXXXXXXXXXXXXXXXXXXXXXXXX-3′
3′-YXXXXXXXXXXXXXXXXXXXXXXXXX-5′

wherein “X”=RNA, “X”=2′-O-methyl RNA, “Y” is an overhang domain comprised of 1-4 RNA monomers that are optionally 2′-O-methyl RNA monomers and underlined residues are 2′-O-methyl RNA monomers. The top strand is the sense strand, and the bottom strand is the antisense strand. In a related embodiment, the DsiRNA comprises:

5′-XXXXXXXXXXXXXXXXXXXXXXXDD-3′
3′-YXXXXXXXXXXXXXXXXXXXXXXXXX-5′

wherein “X”=RNA, “X”=2′-O-methyl RNA, “Y” is an overhang domain comprised of 1-4 RNA monomers that are optionally 2′-O-methyl RNA monomers, underlined residues are 2′-O-methyl RNA monomers, and “D”=DNA. The top strand is the sense strand, and the bottom strand is the antisense strand. In one related embodiment, the DsiRNA comprises:

5′-XXXXXXXXXXXXXXXXXXXXXXXXX-3′
3′-XXXXXXXXXXXXXXXXXXXXXXXXXXX-5′

wherein “X”=RNA and “X”=2′-O-methyl RNA. The top strand is the sense strand, and the bottom strand is the antisense strand. In a further related embodiment, the DsiRNA comprises:

5′-XXXXXXXXXXXXXXXXXXXXXXXDD-3′
3′-XXXXXXXXXXXXXXXXXXXXXXXXXXX-5′

wherein “X”=RNA, “X”=2′-O-methyl RNA, and “D”=DNA. The top strand is the sense strand, and the bottom strand is the antisense strand. This modification pattern is also referred to herein as the “AS-M4” or “M4” modification pattern.

[0154] In additional embodiments, the DsiRNA comprises:

5′-XXXXXXXXXXXXXXXXXXXXXXXXX-3′
3′-YXXXXXXXXXXXXXXXXXXXXXXXXX-5′

wherein “X”=RNA, “X”=2′-O-methyl RNA, “Y” is an overhang domain comprised of 1-4 RNA monomers that are optionally 2′-O-methyl RNA monomers and underlined residues are 2′-O-methyl RNA monomers. The top strand is the sense strand, and the bottom strand is the antisense strand. In a related embodiment, the DsiRNA comprises:

5′-XXXXXXXXXXXXXXXXXXXXXXXDD-3′
3′-YXXXXXXXXXXXXXXXXXXXXXXXXX-5′

wherein “X”=RNA, “X”=2′-O-methyl RNA, “Y” is an overhang domain comprised of 1-4 RNA monomers that are optionally 2′-O-methyl RNA monomers, underlined residues are 2′-O-methyl RNA monomers, and “D”=DNA. The top strand is the sense strand, and the bottom strand is the antisense strand. In another related embodiment, the DsiRNA comprises:

5′-XXXXXXXXXXXXXXXXXXXXXXXXX-3′
3′-XXXXXXXXXXXXXXXXXXXXXXXXXXX-5′

wherein “X”=RNA and “X”=2′-O-methyl RNA. The top strand is the sense strand, and the bottom strand is the antisense strand. In a further related embodiment, the DsiRNA comprises:

5′-XXXXXXXXXXXXXXXXXXXXXXXDD-3′
3′-XXXXXXXXXXXXXXXXXXXXXXXXXXX-5′

wherein “X”=RNA, “X”=2′-O-methyl RNA, and “D”=DNA. The top strand is the sense strand, and the bottom strand is the antisense strand. This modification pattern is also referred to herein as the “AS-M8” or “M8” modification pattern.

[0155] In other embodiments, the DsiRNA comprises:

5′-XXXXXXXXXXXXXXXXXXXXXXXXX-3′
3′-YXXXXXXXXXXXXXXXXXXXXXXXXX-5′

wherein “X”=RNA, “X”=2′-O-methyl RNA, “Y” is an overhang domain comprised of 1-4 RNA monomers that are optionally 2′-O-methyl RNA monomers and underlined residues are 2′-O-methyl RNA monomers. The top strand is the sense strand, and the bottom strand is the antisense strand. In one related embodiment, the DsiRNA comprises:

5′-XXXXXXXXXXXXXXXXXXXXXXXDD-3′
3′-YXXXXXXXXXXXXXXXXXXXXXXXXX-5′

wherein “X”=RNA, “X”=2′-O-methyl RNA, “Y” is an overhang domain comprised of 1-4 RNA monomers that are optionally 2′-O-methyl RNA monomers, underlined residues are 2′-O-methyl RNA monomers, and “D”=DNA. The top strand is the sense strand, and the bottom strand is the antisense strand. In another related embodiment, the DsiRNA comprises:

5′-XXXXXXXXXXXXXXXXXXXXXXXXX-3′
3′-XXXXXXXXXXXXXXXXXXXXXXXXXXX-5′

wherein “X”=RNA and “X”=2′-O-methyl RNA. The top strand is the sense strand, and the bottom strand is the antisense strand. In a further related embodiment, the DsiRNA comprises:

5′-XXXXXXXXXXXXXXXXXXXXXXXDD-3′
3′-XXXXXXXXXXXXXXXXXXXXXXXXXXX-5′

wherein “X”=RNA, “X”=2′-O-methyl RNA, and “D”=DNA. The top strand is the sense strand, and the bottom strand is the antisense strand. This modification pattern is also referred to herein as the “AS-M3” or “M3” modification pattern.

[0156] In additional embodiments, the DsiRNA comprises:

5′-XXXXXXXXXXXXXXXXXXXXXXXXX-3′
3′-YXXXXXXXXXXXXXXXXXXXXXXXXX-5′

wherein “X”=RNA, “X”=2′-O-methyl RNA, “Y” is an overhang domain comprised of 1-4 RNA monomers that are optionally 2′-O-methyl RNA monomers and underlined residues are 2′-O-methyl RNA monomers. The top strand is the sense strand, and the bottom strand is the antisense strand. In a related embodiment, the DsiRNA comprises:

5′-XXXXXXXXXXXXXXXXXXXXXXXDD-3′
3′-YXXXXXXXXXXXXXXXXXXXXXXXXX-5′

wherein “X”=RNA, “X”=2′-O-methyl RNA, “Y” is an overhang domain comprised of 1-4 RNA monomers that are optionally 2′-O-methyl RNA monomers, underlined residues are 2′-O-methyl RNA monomers, and “D”=DNA. The top strand is the sense strand, and the bottom strand is the antisense strand. In another related embodiment, the DsiRNA comprises:

5′-XXXXXXXXXXXXXXXXXXXXXXXXX-3′
3′-XXXXXXXXXXXXXXXXXXXXXXXXXXX-5′

wherein “X”=RNA and “X”=2′-O-methyl RNA. The top strand is the sense strand, and the bottom strand is the antisense strand. In a further related embodiment, the DsiRNA comprises:

5′-XXXXXXXXXXXXXXXXXXXXXXXDD-3′
3′-XXXXXXXXXXXXXXXXXXXXXXXXXXX-5′

wherein “X”=RNA, “X”=2′-O-methyl RNA, and “D”=DNA. The top strand is the sense strand, and the bottom strand is the antisense strand. This modification pattern is also referred to herein as the “AS-M2” or “M2” modification pattern.

[0157] In further embodiments, the DsiRNA comprises:

5′-XXXXXXXXXXXXXXXXXXXXXXXXX-3′
3′-YXXXXXXXXXXXXXXXXXXXXXXXXX-5′

wherein “X”=RNA, “X”=2′-O-methyl RNA, “Y” is an overhang domain comprised of 1-4 RNA monomers that are optionally 2′-O-methyl RNA monomers and underlined residues are 2′-O-methyl RNA monomers. The top strand is the sense strand, and the bottom strand is the antisense strand. In a related embodiment, the DsiRNA comprises:

5′-XXXXXXXXXXXXXXXXXXXXXXXDD-3′
3′-YXXXXXXXXXXXXXXXXXXXXXXXXX-5′

wherein “X”=RNA, “X”=2′-O-methyl RNA, “Y” is an overhang domain comprised of 1-4 RNA monomers that are optionally 2′-O-methyl RNA monomers, underlined residues are 2′-O-methyl RNA monomers, and “D”=DNA. The top strand is the sense strand, and the bottom strand is the antisense strand. In another related embodiment, the DsiRNA comprises:

5′-XXXXXXXXXXXXXXXXXXXXXXXXX-3′
3′-XXXXXXXXXXXXXXXXXXXXXXXXXXX-5′

wherein “X”=RNA and “X”=2′-O-methyl RNA. The top strand is the sense strand, and the bottom strand is the antisense strand. In a further related embodiment, the DsiRNA comprises:

5′-XXXXXXXXXXXXXXXXXXXXXXXDD-3′
3′-XXXXXXXXXXXXXXXXXXXXXXXXXXX-5′

wherein “X”=RNA, “X”=2′-O-methyl RNA, and “D”=DNA. The top strand is the sense strand, and the bottom strand is the antisense strand. This modification pattern is also referred to herein as the “AS-M1” or “M1” modification pattern.

[0158] In additional embodiments, the DsiRNA comprises:

5′-XXXXXXXXXXXXXXXXXXXXXXXXX-3′
3′-YXXXXXXXXXXXXXXXXXXXXXXXXX-5′

wherein “X”=RNA, “X”=2′-O-methyl RNA, “Y” is an overhang domain comprised of 1-4 RNA monomers that are optionally 2′-O-methyl RNA monomers and underlined residues are 2′-O-methyl RNA monomers. The top strand is the sense strand, and the bottom strand is the antisense strand. In one related embodiment, the DsiRNA comprises:

5′-XXXXXXXXXXXXXXXXXXXXXXXDD-3′
3′-YXXXXXXXXXXXXXXXXXXXXXXXXX-5′

wherein “X”=RNA, “X”=2′-O-methyl RNA, “Y” is an overhang domain comprised of 1-4 RNA monomers that are optionally 2′-O-methyl RNA monomers, underlined residues are 2′-O-methyl RNA monomers, and “D”=DNA. The top strand is the sense strand, and the bottom strand is the antisense strand. In another related embodiment, the DsiRNA comprises:

5′-XXXXXXXXXXXXXXXXXXXXXXXXX-3′
3′-XXXXXXXXXXXXXXXXXXXXXXXXXXX-5′

wherein “X”=RNA and “X”=2′-O-methyl RNA. The top strand is the sense strand, and the bottom strand is the antisense strand. In a further related embodiment, the DsiRNA comprises:

5′-XXXXXXXXXXXXXXXXXXXXXXXDD-3′
3′-XXXXXXXXXXXXXXXXXXXXXXXXXXX-5′

wherein “X”=RNA, “X”=2′-O-methyl RNA, and “D”=DNA. The top strand is the sense strand, and the bottom strand is the antisense strand. This modification pattern is also referred to herein as the “AS-M9” or “M9” modification pattern.

[0159] In other embodiments, the DsiRNA comprises:

5′-XXXXXXXXXXXXXXXXXXXXXXXXX-3′
3′-YXXXXXXXXXXXXXXXXXXXXXXXXX-5′

wherein “X”=RNA, “X”=2′-O-methyl RNA, “Y” is an overhang domain comprised of 1-4 RNA monomers that are optionally 2′-O-methyl RNA monomers and underlined residues are 2′-O-methyl RNA monomers. The top strand is the sense strand, and the bottom strand is the antisense strand. In a related embodiment, the DsiRNA comprises:

5′-XXXXXXXXXXXXXXXXXXXXXXXDD-3′
3′-YXXXXXXXXXXXXXXXXXXXXXXXXX-5′

wherein “X”=RNA, “X”=2′-O-methyl RNA, “Y” is an overhang domain comprised of 1-4 RNA monomers that are optionally 2′-O-methyl RNA monomers, underlined residues are 2′-O-methyl RNA monomers, and “D”=DNA. The top strand is the sense strand, and the bottom strand is the antisense strand. In another related embodiment, the DsiRNA comprises:

5′-XXXXXXXXXXXXXXXXXXXXXXXXX-3′
3′-XXXXXXXXXXXXXXXXXXXXXXXXXXX-5′

wherein “X”=RNA and “X”=2′-O-methyl RNA. The top strand is the sense strand, and the bottom strand is the antisense strand. In a further related embodiment, the DsiRNA comprises:

5′-XXXXXXXXXXXXXXXXXXXXXXXDD-3′
3′-XXXXXXXXXXXXXXXXXXXXXXXXXXX-5′

wherein “X”=RNA, “X”=2′-O-methyl RNA, and “D”=DNA. The top strand is the sense strand, and the bottom strand is the antisense strand. This modification pattern is also referred to herein as the “AS-M10” or “M10” modification pattern.

[0160] In further embodiments, the DsiRNA comprises:

5′-XXXXXXXXXXXXXXXXXXXXXXXXX-3′
3′-YXXXXXXXXXXXXXXXXXXXXXXXXX-5′

wherein “X”=RNA, “X”=2′-O-methyl RNA, “Y” is an overhang domain comprised of 1-4 RNA monomers that are optionally 2′-O-methyl RNA monomers and underlined residues are 2′-O-methyl RNA monomers. The top strand is the sense strand, and the bottom strand is the antisense strand. In one related embodiment, the DsiRNA comprises:

5′-XXXXXXXXXXXXXXXXXXXXXXXDD-3′
3′-YXXXXXXXXXXXXXXXXXXXXXXXXX-5′

wherein “X”=RNA, “X”=2′-O-methyl RNA, “Y” is an overhang domain comprised of 1-4 RNA monomers that are optionally 2′-O-methyl RNA monomers, underlined residues are 2′-O-methyl RNA monomers, and “D”=DNA. The top strand is the sense strand, and the bottom strand is the antisense strand. In another related embodiment, the DsiRNA comprises:

5′-XXXXXXXXXXXXXXXXXXXXXXXXX-3′
3′-XXXXXXXXXXXXXXXXXXXXXXXXXXX-5′

wherein “X”=RNA and “X”=2′-O-methyl RNA. The top strand is the sense strand, and the bottom strand is the antisense strand. In a further related embodiment, the DsiRNA comprises:

5′-XXXXXXXXXXXXXXXXXXXXXXXDD-3′
3′-XXXXXXXXXXXXXXXXXXXXXXXXXXX-5′

wherein “X”=RNA, “X”=2′-O-methyl RNA, and “D”=DNA. The top strand is the sense strand, and the bottom strand is the antisense strand. This modification pattern is also referred to herein as the “AS-M11” or “M11” modification pattern.

[0161] In additional embodiments, the DsiRNA comprises:

5′-XXXXXXXXXXXXXXXXXXXXXXXXX-3′
3′-YXXXXXXXXXXXXXXXXXXXXXXXXX-5′

wherein “X”=RNA, “X”=2′-O-methyl RNA, “Y” is an overhang domain comprised of 1-4 RNA monomers that are optionally 2′-O-methyl RNA monomers and underlined residues are 2′-O-methyl RNA monomers. The top strand is the sense strand, and the bottom strand is the antisense strand. In one related embodiment, the DsiRNA comprises:

5′-XXXXXXXXXXXXXXXXXXXXXXXDD-3′
3′-YXXXXXXXXXXXXXXXXXXXXXXXXX-5′

wherein “X”=RNA, “X”=2′-O-methyl RNA, “Y” is an overhang domain comprised of 1-4 RNA monomers that are optionally 2′-O-methyl RNA monomers, underlined residues are 2′-O-methyl RNA monomers, and “D”=DNA. The top strand is the sense strand, and the bottom strand is the antisense strand. In another related embodiment, the DsiRNA comprises:

5′-XXXXXXXXXXXXXXXXXXXXXXXXX-3′
3′-XXXXXXXXXXXXXXXXXXXXXXXXXXX-5′

wherein “X”=RNA and “X”=2′-O-methyl RNA. The top strand is the sense strand, and the bottom strand is the antisense strand. In a further related embodiment, the DsiRNA comprises:

5′-XXXXXXXXXXXXXXXXXXXXXXXDD-3′
3′-XXXXXXXXXXXXXXXXXXXXXXXXXXX-5′

wherein “X”=RNA, “X”=2′-O-methyl RNA, and “D”=DNA. The top strand is the sense strand, and the bottom strand is the antisense strand. This modification pattern is also referred to herein as the “AS-M12” or “M12” modification pattern.

[0162] In further embodiments, the DsiRNA comprises:

5′-XXXXXXXXXXXXXXXXXXXXXXXXX-3′
3′-YXXXXXXXXXXXXXXXXXXXXXXXXX-5′

[0163] wherein “X”=RNA, “X”=2′-O-methyl RNA, “Y” is an overhang domain comprised of 1-4 RNA monomers that are optionally 2′-O-methyl RNA monomers and underlined residues are 2′-O-methyl RNA monomers. The top strand is the sense strand, and the bottom strand is the antisense strand. In one related embodiment, the DsiRNA comprises:

5′-XXXXXXXXXXXXXXXXXXXXXXXDD-3′
3′-YXXXXXXXXXXXXXXXXXXXXXXXXX-5′

wherein “X”=RNA, “X”=2′-O-methyl RNA, “Y” is an overhang domain comprised of 1-4 RNA monomers that are optionally 2′-O-methyl RNA monomers, underlined residues are 2′-O-methyl RNA monomers, and “D”=DNA. The top strand is the sense strand, and the bottom strand is the antisense strand. In another related embodiment, the DsiRNA comprises:

5′-XXXXXXXXXXXXXXXXXXXXXXXXX-3′
3′-XXXXXXXXXXXXXXXXXXXXXXXXXXX-5′

wherein “X”=RNA and “X”=2′-O-methyl RNA. The top strand is the sense strand, and the bottom strand is the antisense strand. In a further related embodiment, the DsiRNA comprises:

5′-XXXXXXXXXXXXXXXXXXXXXXXDD-3′
3′-XXXXXXXXXXXXXXXXXXXXXXXXXXX-5′

wherein “X”=RNA, “X”=2′-O-methyl RNA, and “D”=DNA. The top strand is the sense strand, and the bottom strand is the antisense strand. This modification pattern is also referred to herein as the “AS-M13” or “M13” modification pattern.

[0164] In other embodiments, the DsiRNA comprises:

5′-XXXXXXXXXXXXXXXXXXXXXXXXX-3′
3′-YXXXXXXXXXXXXXXXXXXXXXXXXX-5′

wherein “X”=RNA, “X”=2′-O-methyl RNA, “Y” is an overhang domain comprised of 1-4 RNA monomers that are optionally 2′-O-methyl RNA monomers and underlined residues are 2′-O-methyl RNA monomers. The top strand is the sense strand, and the bottom strand is the antisense strand. In another related embodiment, the DsiRNA comprises:

5′-XXXXXXXXXXXXXXXXXXXXXXXDD-3′
3′-YXXXXXXXXXXXXXXXXXXXXXXXXX-5′

wherein “X”=RNA, “X”=2′-O-methyl RNA, “Y” is an overhang domain comprised of 1-4 RNA monomers that are optionally 2′-O-methyl RNA monomers, underlined residues are 2′-O-methyl RNA monomers, and “D”=DNA. The top strand is the sense strand, and the bottom strand is the antisense strand. In another related embodiment, the DsiRNA comprises:

5′-XXXXXXXXXXXXXXXXXXXXXXXXX-3′
3′-XXXXXXXXXXXXXXXXXXXXXXXXXXX-5′

wherein “X”=RNA and “X”=2′-O-methyl RNA. The top strand is the sense strand, and the bottom strand is the antisense strand. In a further related embodiment, the DsiRNA comprises:

5′-XXXXXXXXXXXXXXXXXXXXXXXDD-3′
3′-XXXXXXXXXXXXXXXXXXXXXXXXXXX-5′

wherein “X”=RNA, “X”=2′-O-methyl RNA, and “D”=DNA. The top strand is the sense strand, and the bottom strand is the antisense strand. This modification pattern is also referred to herein as the “AS-M21” or “M21” modification pattern.

[0165] In further embodiments, the DsiRNA comprises:

5′-XXXXXXXXXXXXXXXXXXXXXXXXX-3′
3′-YXXXXXXXXXXXXXXXXXXXXXXXXX-5′

wherein “X”=RNA, “X”=2′-O-methyl RNA, “Y” is an overhang domain comprised of 1-4 RNA monomers that are optionally 2′-O-methyl RNA monomers and underlined residues are 2′-O-methyl RNA monomers. The top strand is the sense strand, and the bottom strand is the antisense strand. In one related embodiment, the DsiRNA comprises:

5′-XXXXXXXXXXXXXXXXXXXXXXXDD-3′
3′-YXXXXXXXXXXXXXXXXXXXXXXXXX-5′

wherein “X”=RNA, “X”=2′-O-methyl RNA, “Y” is an overhang domain comprised of 1-4 RNA monomers that are optionally 2′-O-methyl RNA monomers, underlined residues are 2′-O-methyl RNA monomers, and “D”=DNA. The top strand is the sense strand, and the bottom strand is the antisense strand. In another related embodiment, the DsiRNA comprises:

5′-XXXXXXXXXXXXXXXXXXXXXXXXX-3′
3′-XXXXXXXXXXXXXXXXXXXXXXXXXXX-5′

wherein “X”=RNA and “X”=2′-O-methyl RNA. The top strand is the sense strand, and the bottom strand is the antisense strand. In a further related embodiment, the DsiRNA comprises:

5′-XXXXXXXXXXXXXXXXXXXXXXXDD-3′
3′-XXXXXXXXXXXXXXXXXXXXXXXXXXX-5′

wherein “X”=RNA, “X”=2′-O-methyl RNA, and “D”=DNA. The top strand is the sense strand, and the bottom strand is the antisense strand. This modification pattern is also referred to herein as the “AS-M14” or “M14” modification pattern.

[0166] In additional embodiments, the DsiRNA comprises:

5′-XXXXXXXXXXXXXXXXXXXXXXXXX-3′
3′-YXXXXXXXXXXXXXXXXXXXXXXXXX-5′

wherein “X”=RNA, “X”=2′-O-methyl RNA, “Y” is an overhang domain comprised of 1-4 RNA monomers that are optionally 2′-O-methyl RNA monomers and underlined residues are 2′-O-methyl RNA monomers. The top strand is the sense strand, and the bottom strand is the antisense strand. In one related embodiment, the DsiRNA comprises:

5′-XXXXXXXXXXXXXXXXXXXXXXXDD-3′
3′-YXXXXXXXXXXXXXXXXXXXXXXXXX-5′

wherein “X”=RNA, “X”=2′-O-methyl RNA, “Y” is an overhang domain comprised of 1-4 RNA monomers that are optionally 2′-O-methyl RNA monomers, underlined residues are 2′-O-methyl RNA monomers, and “D”=DNA. The top strand is the sense strand, and the bottom strand is the antisense strand. In another related embodiment, the DsiRNA comprises:

5′-XXXXXXXXXXXXXXXXXXXXXXXXX-3′
3′-XXXXXXXXXXXXXXXXXXXXXXXXXXX-5′

wherein “X”=RNA and “X”=2′-O-methyl RNA. The top strand is the sense strand, and the bottom strand is the antisense strand. In a further related embodiment, the DsiRNA comprises:

5′-XXXXXXXXXXXXXXXXXXXXXXXDD-3′
3′-XXXXXXXXXXXXXXXXXXXXXXXXXXX-5′

wherein “X”=RNA, “X”=2′-O-methyl RNA, and “D”=DNA. The top strand is the sense strand, and the bottom strand is the antisense strand. This modification pattern is also referred to herein as the “AS-M15” or “M15” modification pattern.

[0167] In further embodiments, the DsiRNA comprises:

5′-XXXXXXXXXXXXXXXXXXXXXXXXX-3′
3′-YXXXXXXXXXXXXXXXXXXXXXXXXX-5′

wherein “X”=RNA, “X”=2′-O-methyl RNA, “Y” is an overhang domain comprised of 1-4 RNA monomers that are optionally 2′-O-methyl RNA monomers and underlined residues are 2′-O-methyl RNA monomers. The top strand is the sense strand, and the bottom strand is the antisense strand. In a related embodiment, the DsiRNA comprises:

5′-XXXXXXXXXXXXXXXXXXXXXXXDD-3′
3′-YXXXXXXXXXXXXXXXXXXXXXXXXX-5′

wherein “X”=RNA, “X”=2′-O-methyl RNA, “Y” is an overhang domain comprised of 1-4 RNA monomers that are optionally 2′-O-methyl RNA monomers, underlined residues are 2′-O-methyl RNA monomers, and “D”=DNA. The top strand is the sense strand, and the bottom strand is the antisense strand. In another related embodiment, the DsiRNA comprises:

5′-XXXXXXXXXXXXXXXXXXXXXXXXX-3′
3′-XXXXXXXXXXXXXXXXXXXXXXXXXXX-5′

wherein “X”=RNA and “X”=2′-O-methyl RNA. The top strand is the sense strand, and the bottom strand is the antisense strand. In a further related embodiment, the DsiRNA comprises:

5′-XXXXXXXXXXXXXXXXXXXXXXXDD-3′
3′-XXXXXXXXXXXXXXXXXXXXXXXXXXX-5′

wherein “X”=RNA, “X”=2′-O-methyl RNA, and “D”=DNA. The top strand is the sense strand, and the bottom strand is the antisense strand. This modification pattern is also referred to herein as the “AS-M16” or “M16” modification pattern.

[0168] In additional embodiments, the DsiRNA comprises:

5′-XXXXXXXXXXXXXXXXXXXXXXXXX-3′
3′-YXXXXXXXXXXXXXXXXXXXXXXXXX-5′

wherein “X”=RNA, “X”=2′-O-methyl RNA, “Y” is an overhang domain comprised of 1-4 RNA monomers that are optionally 2′-O-methyl RNA monomers and underlined residues are 2′-O-methyl RNA monomers. The top strand is the sense strand, and the bottom strand is the antisense strand. In one related embodiment, the DsiRNA comprises:

5′-XXXXXXXXXXXXXXXXXXXXXXXDD-3′
3′-YXXXXXXXXXXXXXXXXXXXXXXXXX-5′

wherein “X”=RNA, “X”=2′-O-methyl RNA, “Y” is an overhang domain comprised of 1-4 RNA monomers that are optionally 2′-O-methyl RNA monomers, underlined residues are 2′-O-methyl RNA monomers, and “D”=DNA. The top strand is the sense strand, and the bottom strand is the antisense strand. In another related embodiment, the DsiRNA comprises:

5′-XXXXXXXXXXXXXXXXXXXXXXXXX-3′
3′-XXXXXXXXXXXXXXXXXXXXXXXXXXX-5′

wherein “X”=RNA and “X”=2′-O-methyl RNA. The top strand is the sense strand, and the bottom strand is the antisense strand. In a further related embodiment, the DsiRNA comprises:

5′-XXXXXXXXXXXXXXXXXXXXXXXDD-3′
3′-XXXXXXXXXXXXXXXXXXXXXXXXXXX-5′

wherein “X”=RNA, “X”=2′-O-methyl RNA, and “D”=DNA. The top strand is the sense strand, and the bottom strand is the antisense strand. This modification pattern is also referred to herein as the “AS-M17” or “M17” modification pattern.

[0169] In further embodiments, the DsiRNA comprises:

5′-XXXXXXXXXXXXXXXXXXXXXXXXX-3′
3′-YXXXXXXXXXXXXXXXXXXXXXXXXX-5′

wherein “X”=RNA, “X”=2′-O-methyl RNA, “Y” is an overhang domain comprised of 1-4 RNA monomers that are optionally 2′-O-methyl RNA monomers and underlined residues are 2′-O-methyl RNA monomers. The top strand is the sense strand, and the bottom strand is the antisense strand. In one related embodiment, the DsiRNA comprises:

5′-XXXXXXXXXXXXXXXXXXXXXXXDD-3′
3′-YXXXXXXXXXXXXXXXXXXXXXXXXX-5′

wherein “X”=RNA, “X”=2′-O-methyl RNA, “Y” is an overhang domain comprised of 1-4 RNA monomers that are optionally 2′-O-methyl RNA monomers, underlined residues are 2′-O-methyl RNA monomers, and “D”=DNA. The top strand is the sense strand, and the bottom strand is the antisense strand. In another related embodiment, the DsiRNA comprises:

5′-XXXXXXXXXXXXXXXXXXXXXXXXX-3′
3′-XXXXXXXXXXXXXXXXXXXXXXXXXXX-5′

wherein “X”=RNA and “X”=2′-O-methyl RNA. The top strand is the sense strand, and the bottom strand is the antisense strand. In a further related embodiment, the DsiRNA comprises:

5′-XXXXXXXXXXXXXXXXXXXXXXXDD-3′
3′-XXXXXXXXXXXXXXXXXXXXXXXXXXX-5′

wherein “X”=RNA, “X”=2′-O-methyl RNA, and “D”=DNA. The top strand is the sense strand, and the bottom strand is the antisense strand. This modification pattern is also referred to herein as the “AS-M18” or “M18” modification pattern.

[0170] In additional embodiments, the DsiRNA comprises:

5′-XXXXXXXXXXXXXXXXXXXXXXXXX-3′
3′-YXXXXXXXXXXXXXXXXXXXXXXXXX-5′

wherein “X”=RNA, “X”=2′-O-methyl RNA, “Y” is an overhang domain comprised of 1-4 RNA monomers that are optionally 2′-O-methyl RNA monomers and underlined residues are 2′-O-methyl RNA monomers. The top strand is the sense strand, and the bottom strand is the antisense strand. In one related embodiment, the DsiRNA comprises:

5′-XXXXXXXXXXXXXXXXXXXXXXXDD-3′
3′-YXXXXXXXXXXXXXXXXXXXXXXXXX-5′

wherein “X”=RNA, “X”=2′-O-methyl RNA, “Y” is an overhang domain comprised of 1-4 RNA monomers that are optionally 2′-O-methyl RNA monomers, underlined residues are 2′-O-methyl RNA monomers, and “D”=DNA. The top strand is the sense strand, and the bottom strand is the antisense strand. In another related embodiment, the DsiRNA comprises:

5′-XXXXXXXXXXXXXXXXXXXXXXXXX-3′
3′-XXXXXXXXXXXXXXXXXXXXXXXXXXX-5′

wherein “X”=RNA and “X”=2′-O-methyl RNA. The top strand is the sense strand, and the bottom strand is the antisense strand. In a further related embodiment, the DsiRNA comprises:

5′-XXXXXXXXXXXXXXXXXXXXXXXDD-3′
3′-XXXXXXXXXXXXXXXXXXXXXXXXXXX-5′

wherein “X”=RNA, “X”=2′-O-methyl RNA, and “D”=DNA. The top strand is the sense strand, and the bottom strand is the antisense strand. This modification pattern is also referred to herein as the “AS-M19” or “M19” modification pattern.

[0171] In further embodiments, the DsiRNA comprises:

5′-XXXXXXXXXXXXXXXXXXXXXXXXX-3′
3′-YXXXXXXXXXXXXXXXXXXXXXXXXX-5′

wherein “X”=RNA, “X”=2′-O-methyl RNA, “Y” is an overhang domain comprised of 1-4 RNA monomers that are optionally 2′-O-methyl RNA monomers and underlined residues are 2′-O-methyl RNA monomers. The top strand is the sense strand, and the bottom strand is the antisense strand. In one related embodiment, the DsiRNA comprises:

5′-XXXXXXXXXXXXXXXXXXXXXXXDD-3′
3′-YXXXXXXXXXXXXXXXXXXXXXXXXX-5′

wherein “X”=RNA, “X”=2′-O-methyl RNA, “Y” is an overhang domain comprised of 1-4 RNA monomers that are optionally 2′-O-methyl RNA monomers, underlined residues are 2′-O-methyl RNA monomers, and “D”=DNA. The top strand is the sense strand, and the bottom strand is the antisense strand. In another related embodiment, the DsiRNA comprises:

5′-XXXXXXXXXXXXXXXXXXXXXXXXX-3′
3′-XXXXXXXXXXXXXXXXXXXXXXXXXXX-5′

wherein “X”=RNA and “X”=2′-O-methyl RNA. The top strand is the sense strand, and the bottom strand is the antisense strand. In a further related embodiment, the DsiRNA comprises:

5′-XXXXXXXXXXXXXXXXXXXXXXXDD-3′
3′-XXXXXXXXXXXXXXXXXXXXXXXXXXX-5′

wherein “X”=RNA, “X”=2′-O-methyl RNA, and “D”=DNA. The top strand is the sense strand, and the bottom strand is the antisense strand. This modification pattern is also referred to herein as the “AS-M20” or “M20” modification pattern.

[0172] In additional embodiments, the DsiRNA comprises:

5′-XXXXXXXXXXXXXXXXXXXXXXXXX-3′
3′-YXXXXXXXXXXXXXXXXXXXXXXXXX-5′

wherein “X”=RNA, “X”=2′-O-methyl RNA, “Y” is an overhang domain comprised of 1-4 RNA monomers that are optionally 2′-O-methyl RNA monomers and underlined residues are 2′-O-methyl RNA monomers. The top strand is the sense strand, and the bottom strand is the antisense strand. In one related embodiment, the DsiRNA comprises:

5′-XXXXXXXXXXXXXXXXXXXXXXXDD-3′
3′-YXXXXXXXXXXXXXXXXXXXXXXXXX-5′

wherein “X”=RNA, “X”=2′-O-methyl RNA, “Y” is an overhang domain comprised of 1-4 RNA monomers that are optionally 2′-O-methyl RNA monomers, underlined residues are 2′-O-methyl RNA monomers, and “D”=DNA. The top strand is the sense strand, and the bottom strand is the antisense strand. In another related embodiment, the DsiRNA comprises:

5′-XXXXXXXXXXXXXXXXXXXXXXXXX-3′
3′-XXXXXXXXXXXXXXXXXXXXXXXXXXX-5′

wherein “X”=RNA and “X”=2′-O-methyl RNA. The top strand is the sense strand, and the bottom strand is the antisense strand. In a further related embodiment, the DsiRNA comprises:

5′-XXXXXXXXXXXXXXXXXXXXXXXDD-3′
3′-XXXXXXXXXXXXXXXXXXXXXXXXXXX-5′

wherein “X”=RNA, “X”=2′-O-methyl RNA, and “D”=DNA. The top strand is the sense strand, and the bottom strand is the antisense strand. This modification pattern is also referred to herein as the “AS-M22” or “M22” modification pattern.

[0173] In further embodiments, the DsiRNA comprises:

5′-XXXXXXXXXXXXXXXXXXXXXXXXX-3′
3′-YXXXXXXXXXXXXXXXXXXXXXXXXX-5′

wherein “X”=RNA, “X”=2′-O-methyl RNA, “Y” is an overhang domain comprised of 1-4 RNA monomers that are optionally 2′-O-methyl RNA monomers and underlined residues are 2′-O-methyl RNA monomers. The top strand is the sense strand, and the bottom strand is the antisense strand. In one related embodiment, the DsiRNA comprises:

5′-XXXXXXXXXXXXXXXXXXXXXXXDD-3′
3′-YXXXXXXXXXXXXXXXXXXXXXXXXX-5′

wherein “X”=RNA, “X”=2′-O-methyl RNA, “Y” is an overhang domain comprised of 1-4 RNA monomers that are optionally 2′-O-methyl RNA monomers, underlined residues are 2′-O-methyl RNA monomers, and “D”=DNA. The top strand is the sense strand, and the bottom strand is the antisense strand. In another related embodiment, the DsiRNA comprises:

5′-XXXXXXXXXXXXXXXXXXXXXXXXX-3′
3′-XXXXXXXXXXXXXXXXXXXXXXXXXXX-5′

wherein “X”=RNA and “X”=2′-O-methyl RNA. The top strand is the sense strand, and the bottom strand is the antisense strand. In a further related embodiment, the DsiRNA comprises:

5′-XXXXXXXXXXXXXXXXXXXXXXXDD-3′
3′-XXXXXXXXXXXXXXXXXXXXXXXXXXX-5′

wherein “X”=RNA, “X”=2′-O-methyl RNA, and “D”=DNA. The top strand is the sense strand, and the bottom strand is the antisense strand. This modification pattern is also referred to herein as the “AS-M24” or “M24” modification pattern.

[0174] In additional embodiments, the DsiRNA comprises:

5′-XXXXXXXXXXXXXXXXXXXXXXXXX-3′
3′-YXXXXXXXXXXXXXXXXXXXXXXXXX-5′

wherein “X”=RNA, “X”=2′-O-methyl RNA, “Y” is an overhang domain comprised of 1-4 RNA monomers that are optionally 2′-O-methyl RNA monomers and underlined residues are 2′-O-methyl RNA monomers. The top strand is the sense strand, and the bottom strand is the antisense strand. In one related embodiment, the DsiRNA comprises:

5′-XXXXXXXXXXXXXXXXXXXXXXXDD-3′
3′-YXXXXXXXXXXXXXXXXXXXXXXXXX-5′

wherein “X”=RNA, “X”=2′-O-methyl RNA, “Y” is an overhang domain comprised of 1-4 RNA monomers that are optionally 2′-O-methyl RNA monomers, underlined residues are 2′-O-methyl RNA monomers, and “D”=DNA. The top strand is the sense strand, and the bottom strand is the antisense strand. In another related embodiment, the DsiRNA comprises:

5′-XXXXXXXXXXXXXXXXXXXXXXXXX-3′
3′-XXXXXXXXXXXXXXXXXXXXXXXXXXX-5′

wherein “X”=RNA and “X”=2′-O-methyl RNA. The top strand is the sense strand, and the bottom strand is the antisense strand. In a further related embodiment, the DsiRNA comprises:

5′-XXXXXXXXXXXXXXXXXXXXXXXDD-3′
3′-XXXXXXXXXXXXXXXXXXXXXXXXXXX-5′

wherein “X”=RNA, “X”=2′-O-methyl RNA, and “D”=DNA. The top strand is the sense strand, and the bottom strand is the antisense strand. This modification pattern is also referred to herein as the “AS-M25” or “M25” modification pattern.

[0175] In further embodiments, the DsiRNA comprises:

5′-XXXXXXXXXXXXXXXXXXXXXXXXX-3′
3′-YXXXXXXXXXXXXXXXXXXXXXXXXX-5′

[0176] wherein “X”=RNA, “X”=2′-O-methyl RNA, “Y” is an overhang domain comprised of 1-4 RNA monomers that are optionally 2′-O-methyl RNA monomers and underlined residues are 2′-O-methyl RNA monomers. The top strand is the sense strand, and the bottom strand is the antisense strand. In one related embodiment, the DsiRNA comprises:

5′-XXXXXXXXXXXXXXXXXXXXXXXDD-3′
3′-YXXXXXXXXXXXXXXXXXXXXXXXXX-5′

wherein “X”=RNA, “X”=2′-O-methyl RNA, “Y” is an overhang domain comprised of 1-4 RNA monomers that are optionally 2′-O-methyl RNA monomers, underlined residues are 2′-O-methyl RNA monomers, and “D”=DNA. The top strand is the sense strand, and the bottom strand is the antisense strand. In another related embodiment, the DsiRNA comprises:

5′-XXXXXXXXXXXXXXXXXXXXXXXXX-3′
3′-XXXXXXXXXXXXXXXXXXXXXXXXXXX-5′

wherein “X”=RNA and “X”=2′-O-methyl RNA. The top strand is the sense strand, and the bottom strand is the antisense strand. In a further related embodiment, the DsiRNA comprises:

5′-XXXXXXXXXXXXXXXXXXXXXXXDD-3′
3′-XXXXXXXXXXXXXXXXXXXXXXXXXXX-5′

wherein “X”=RNA, “X”=2′-O-methyl RNA, and “D”=DNA. The top strand is the sense strand, and the bottom strand is the antisense strand. This modification pattern is also referred to herein as the “AS-M26” or “M26” modification pattern.

[0177] In additional embodiments, the DsiRNA comprises:

5′-XXXXXXXXXXXXXXXXXXXXXXXXX-3′
3′-YXXXXXXXXXXXXXXXXXXXXXXXXX-5′

wherein “X”=RNA, “X”=2′-O-methyl RNA, “Y” is an overhang domain comprised of 1-4 RNA monomers that are optionally 2′-O-methyl RNA monomers and underlined residues are 2′-O-methyl RNA monomers. The top strand is the sense strand, and the bottom strand is the antisense strand. In one related embodiment, the DsiRNA comprises:

5′-XXXXXXXXXXXXXXXXXXXXXXXDD-3′
3′-YXXXXXXXXXXXXXXXXXXXXXXXXX-5′

wherein “X”=RNA, “X”=2′-O-methyl RNA, “Y” is an overhang domain comprised of 1-4 RNA monomers that are optionally 2′-O-methyl RNA monomers, underlined residues are 2′-O-methyl RNA monomers, and “D”=DNA. The top strand is the sense strand, and the bottom strand is the antisense strand. In another related embodiment, the DsiRNA comprises:

5′-XXXXXXXXXXXXXXXXXXXXXXXXX-3′
3′-XXXXXXXXXXXXXXXXXXXXXXXXXXX-5′

wherein “X”=RNA and “X”=2′-O-methyl RNA. The top strand is the sense strand, and the bottom strand is the antisense strand. In a further related embodiment, the DsiRNA comprises:

5′-XXXXXXXXXXXXXXXXXXXXXXXDD-3′
3′-XXXXXXXXXXXXXXXXXXXXXXXXXXX-5′

wherein “X”=RNA, “X”=2′-O-methyl RNA, and “D”=DNA. The top strand is the sense strand, and the bottom strand is the antisense strand. This modification pattern is also referred to herein as the “AS-M27” or “M27” modification pattern.

[0178] In further embodiments, the DsiRNA comprises:

5′-XXXXXXXXXXXXXXXXXXXXXXXXX-3′
3′-YXXXXXXXXXXXXXXXXXXXXXXXXX-5′

wherein “X”=RNA, “X”=2′-O-methyl RNA, “Y” is an overhang domain comprised of 1-4 RNA monomers that are optionally 2′-O-methyl RNA monomers and underlined residues are 2′-O-methyl RNA monomers. The top strand is the sense strand, and the bottom strand is the antisense strand. In one related embodiment, the DsiRNA comprises:

5′-XXXXXXXXXXXXXXXXXXXXXXXDD-3′
3′-YXXXXXXXXXXXXXXXXXXXXXXXXX-5′

wherein “X”=RNA, “X”=2′-O-methyl RNA, “Y” is an overhang domain comprised of 1-4 RNA monomers that are optionally 2′-O-methyl RNA monomers, underlined residues are 2′-O-methyl RNA monomers, and “D”=DNA. The top strand is the sense strand, and the bottom strand is the antisense strand. In another related embodiment, the DsiRNA comprises:

5′-XXXXXXXXXXXXXXXXXXXXXXXXX-3′
3′-XXXXXXXXXXXXXXXXXXXXXXXXXXX-5′

wherein “X”=RNA and “X”=2′-O-methyl RNA. The top strand is the sense strand, and the bottom strand is the antisense strand. In a further related embodiment, the DsiRNA comprises:

5′-XXXXXXXXXXXXXXXXXXXXXXXDD-3′
3′-XXXXXXXXXXXXXXXXXXXXXXXXXXX-5′

wherein “X”=RNA, “X”=2′-O-methyl RNA, and “D”=DNA. The top strand is the sense strand, and the bottom strand is the antisense strand. This modification pattern is also referred to herein as the “AS-M28” or “M28” modification pattern.

[0179] In further embodiments, the DsiRNA comprises:

5′-XXXXXXXXXXXXXXXXXXXXXXXXX-3′
3′-YXXXXXXXXXXXXXXXXXXXXXXXXX-5′

wherein “X”=RNA, “X”=2′-O-methyl RNA, “Y” is an overhang domain comprised of 1-4 RNA monomers that are optionally 2′-O-methyl RNA monomers and underlined residues are 2′-O-methyl RNA monomers. The top strand is the sense strand, and the bottom strand is the antisense strand. In one related embodiment, the DsiRNA comprises:

5′-XXXXXXXXXXXXXXXXXXXXXXXDD-3′
3′-YXXXXXXXXXXXXXXXXXXXXXXXXX-5′

wherein “X”=RNA, “X”=2′-O-methyl RNA, “Y” is an overhang domain comprised of 1-4 RNA monomers that are optionally 2′-O-methyl RNA monomers, underlined residues are 2′-O-methyl RNA monomers, and “D”=DNA. The top strand is the sense strand, and the bottom strand is the antisense strand. In another related embodiment, the DsiRNA comprises:

5′-XXXXXXXXXXXXXXXXXXXXXXXXX-3′
3′-XXXXXXXXXXXXXXXXXXXXXXXXXXX-5′

wherein “X”=RNA and “X”=2′-O-methyl RNA. The top strand is the sense strand, and the bottom strand is the antisense strand. In a further related embodiment, the DsiRNA comprises:

5′-XXXXXXXXXXXXXXXXXXXXXXXDD-3′
3′-XXXXXXXXXXXXXXXXXXXXXXXXXXX-5′

wherein “X”=RNA, “X”=2′-O-methyl RNA, and “D”=DNA. The top strand is the sense strand, and the bottom strand is the antisense strand. This modification pattern is also referred to herein as the “AS-M29” or “M29” modification pattern.

[0180] In additional embodiments, the DsiRNA comprises:

5′-XXXXXXXXXXXXXXXXXXXXXXXXX-3′
3′-XXXXXXXXXXXXXXXXXXXXXXXXXXX-5′

wherein “X”=RNA and “X”=2′-O-methyl RNA. The top strand is the sense strand, and the bottom strand is the antisense strand. In a further related embodiment, the DsiRNA comprises:

5′-XXXXXXXXXXXXXXXXXXXXXXXDD-3′
3′-XXXXXXXXXXXXXXXXXXXXXXXXXXX-5′

wherein “X”=RNA, “X”=2′-O-methyl RNA, and “D”=DNA. The top strand is the sense strand, and the bottom strand is the antisense strand. This modification pattern is also referred to herein as the “AS-M30” or “M30” modification pattern.

[0181] In further embodiments, the DsiRNA comprises:

5′-XXXXXXXXXXXXXXXXXXXXXXXXX-3′
3′-XXXXXXXXXXXXXXXXXXXXXXXXXXX-5′

wherein “X”=RNA and “X”=2′-O-methyl RNA. The top strand is the sense strand, and the bottom strand is the antisense strand. In a further related embodiment, the DsiRNA comprises:

5′-XXXXXXXXXXXXXXXXXXXXXXXDD-3′
3′-XXXXXXXXXXXXXXXXXXXXXXXXXXX-5′

wherein “X”=RNA, “X”=2′-O-methyl RNA, and “D”=DNA. The top strand is the sense strand, and the bottom strand is the antisense strand. This modification pattern is also referred to herein as the “AS-M31” or “M31” modification pattern.

[0182] In additional embodiments, the DsiRNA comprises:

5′-XXXXXXXXXXXXXXXXXXXXXXXXX-3′
3′-XXXXXXXXXXXXXXXXXXXXXXXXXXX-5′

wherein “X”=RNA and “X”=2′-O-methyl RNA. The top strand is the sense strand, and the bottom strand is the antisense strand. In a further related embodiment, the DsiRNA comprises:

5′-XXXXXXXXXXXXXXXXXXXXXXXDD-3′
3′-XXXXXXXXXXXXXXXXXXXXXXXXXXX-5′

wherein “X”=RNA, “X”=2′-O-methyl RNA, and “D”=DNA. The top strand is the sense strand, and the bottom strand is the antisense strand. This modification pattern is also referred to herein as the “AS-M32” or “M32” modification pattern.

[0183] In further embodiments, the DsiRNA comprises:

5′-XXXXXXXXXXXXXXXXXXXXXXXXX-3′
3′-YXXXXXXXXXXXXXXXXXXXXXXXXX-5′

wherein “X”=RNA, “X”=2′-O-methyl RNA, “Y” is an overhang domain comprised of 1-4 RNA monomers that are optionally 2′-O-methyl RNA monomers and underlined residues are 2′-O-methyl RNA monomers. The top strand is the sense strand, and the bottom strand is the antisense strand. In one related embodiment, the DsiRNA comprises:

5′-XXXXXXXXXXXXXXXXXXXXXXXDD-3′
3′-YXXXXXXXXXXXXXXXXXXXXXXXXX-5′

wherein “X”=RNA, “X”=2′-O-methyl RNA, “Y” is an overhang domain comprised of 1-4 RNA monomers that are optionally 2′-O-methyl RNA monomers, underlined residues are 2′-O-methyl RNA monomers, and “D”=DNA. The top strand is the sense strand, and the bottom strand is the antisense strand. In another related embodiment, the DsiRNA comprises:

5′-XXXXXXXXXXXXXXXXXXXXXXXXX-3′
3′-XXXXXXXXXXXXXXXXXXXXXXXXXXX-5′

wherein “X”=RNA and “X”=2′-O-methyl RNA. The top strand is the sense strand, and the bottom strand is the antisense strand. In a further related embodiment, the DsiRNA comprises:

5′-XXXXXXXXXXXXXXXXXXXXXXXDD-3′
3′-XXXXXXXXXXXXXXXXXXXXXXXXXXX-5′

wherein “X”=RNA, “X”=2′-O-methyl RNA, and “D”=DNA. The top strand is the sense strand, and the bottom strand is the antisense strand. This modification pattern is also referred to herein as the “AS-M34” or “M34” modification pattern.

[0184] In additional embodiments, the DsiRNA comprises:

5′-XXXXXXXXXXXXXXXXXXXXXXXXX-3′
3′-YXXXXXXXXXXXXXXXXXXXXXXXXX-5′

wherein “X”=RNA, “X”=2′-O-methyl RNA, “Y” is an overhang domain comprised of 1-4 RNA monomers that are optionally 2′-O-methyl RNA monomers and underlined residues are 2′-O-methyl RNA monomers. The top strand is the sense strand, and the bottom strand is the antisense strand. In one related embodiment, the DsiRNA comprises:

5′-XXXXXXXXXXXXXXXXXXXXXXXDD-3′
3′-YXXXXXXXXXXXXXXXXXXXXXXXXX-5′

wherein “X”=RNA, “X”=2′-O-methyl RNA, “Y” is an overhang domain comprised of 1-4 RNA monomers that are optionally 2′-O-methyl RNA monomers, underlined residues are 2′-O-methyl RNA monomers, and “D”=DNA. The top strand is the sense strand, and the bottom strand is the antisense strand. In another related embodiment, the DsiRNA comprises:

5′-XXXXXXXXXXXXXXXXXXXXXXXXX-3′
3′-XXXXXXXXXXXXXXXXXXXXXXXXXXX-5′

wherein “X”=RNA and “X”=2′-O-methyl RNA. The top strand is the sense strand, and the bottom strand is the antisense strand. In a further related embodiment, the DsiRNA comprises:

5′-XXXXXXXXXXXXXXXXXXXXXXXDD-3′
3′-XXXXXXXXXXXXXXXXXXXXXXXXXXX-5′

wherein “X”=RNA, “X”=2′-O-methyl RNA, and “D”=DNA. The top strand is the sense strand, and the bottom strand is the antisense strand. This modification pattern is also referred to herein as the “AS-M35” or “M35” modification pattern.

[0185] In further embodiments, the DsiRNA comprises:

5′-XXXXXXXXXXXXXXXXXXXXXXXXX-3′
3′-YXXXXXXXXXXXXXXXXXXXXXXXXX-5′

wherein “X”=RNA, “X”=2′-O-methyl RNA, “Y” is an overhang domain comprised of 1-4 RNA monomers that are optionally 2′-O-methyl RNA monomers and underlined residues are 2′-O-methyl RNA monomers. The top strand is the sense strand, and the bottom strand is the antisense strand. In one related embodiment, the DsiRNA comprises:

5′-XXXXXXXXXXXXXXXXXXXXXXXDD-3′
3′-YXXXXXXXXXXXXXXXXXXXXXXXXX-5′

wherein “X”=RNA, “X”=2′-O-methyl RNA, “Y” is an overhang domain comprised of 1-4 RNA monomers that are optionally 2′-O-methyl RNA monomers, underlined residues are 2′-O-methyl RNA monomers, and “D”=DNA. The top strand is the sense strand, and the bottom strand is the antisense strand. In another related embodiment, the DsiRNA comprises:

5′-XXXXXXXXXXXXXXXXXXXXXXXXX-3′
3′-XXXXXXXXXXXXXXXXXXXXXXXXXXX-5′

wherein “X”=RNA and “X”=2′-O-methyl RNA. The top strand is the sense strand, and the bottom strand is the antisense strand. In a further related embodiment, the DsiRNA comprises:

5′-XXXXXXXXXXXXXXXXXXXXXXXDD-3′
3′-XXXXXXXXXXXXXXXXXXXXXXXXXXX-5′

wherein “X”=RNA, “X”=2′-O-methyl RNA, and “D”=DNA. The top strand is the sense strand, and the bottom strand is the antisense strand. This modification pattern is also referred to herein as the “AS-M37” or “M37” modification pattern.

[0186] In additional embodiments, the DsiRNA comprises:

5′-XXXXXXXXXXXXXXXXXXXXXXXXX-3′
3′-YXXXXXXXXXXXXXXXXXXXXXXXXX-5′

wherein “X”=RNA, “X”=2′-O-methyl RNA, “Y” is an overhang domain comprised of 1-4 RNA monomers that are optionally 2′-O-methyl RNA monomers and underlined residues are 2′-O-methyl RNA monomers. The top strand is the sense strand, and the bottom strand is the antisense strand. In one related embodiment, the DsiRNA comprises:

5′-XXXXXXXXXXXXXXXXXXXXXXXDD-3′
3′-YXXXXXXXXXXXXXXXXXXXXXXXXX-5′

wherein “X”=RNA, “X”=2′-O-methyl RNA, “Y” is an overhang domain comprised of 1-4 RNA monomers that are optionally 2′-O-methyl RNA monomers, underlined residues are 2′-O-methyl RNA monomers, and “D”=DNA. The top strand is the sense strand, and the bottom strand is the antisense strand. In another related embodiment, the DsiRNA comprises:

5′-XXXXXXXXXXXXXXXXXXXXXXXXX-3′
3′-XXXXXXXXXXXXXXXXXXXXXXXXXXX-5′

wherein “X”=RNA and “X”=2′-O-methyl RNA. The top strand is the sense strand, and the bottom strand is the antisense strand. In a further related embodiment, the DsiRNA comprises:

5′-XXXXXXXXXXXXXXXXXXXXXXXDD-3′
3′-XXXXXXXXXXXXXXXXXXXXXXXXXXX-5′

wherein “X”=RNA, “X”=2′-O-methyl RNA, and “D”=DNA. The top strand is the sense strand, and the bottom strand is the antisense strand. This modification pattern is also referred to herein as the “AS-M38” or “M38” modification pattern.

[0187] In further embodiments, the DsiRNA comprises:

5′-XXXXXXXXXXXXXXXXXXXXXXXXX-3′
3′-YXXXXXXXXXXXXXXXXXXXXXXXXX-5′

wherein “X”=RNA, “X”=2′-O-methyl RNA, “Y” is an overhang domain comprised of 1-4 RNA monomers that are optionally 2′-O-methyl RNA monomers and underlined residues are 2′-O-methyl RNA monomers. The top strand is the sense strand, and the bottom strand is the antisense strand. In one related embodiment, the DsiRNA comprises:

5′-XXXXXXXXXXXXXXXXXXXXXXXDD-3′
3′-YXXXXXXXXXXXXXXXXXXXXXXXXX-5′

wherein “X”=RNA, “X”=2′-O-methyl RNA, “Y” is an overhang domain comprised of 1-4 RNA monomers that are optionally 2′-O-methyl RNA monomers, underlined residues are 2′-O-methyl RNA monomers, and “D”=DNA. The top strand is the sense strand, and the bottom strand is the antisense strand. In another related embodiment, the DsiRNA comprises:

5′-XXXXXXXXXXXXXXXXXXXXXXXXX-3′
3′-XXXXXXXXXXXXXXXXXXXXXXXXXXX-5′

wherein “X”=RNA and “X”=2′-O-methyl RNA. The top strand is the sense strand, and the bottom strand is the antisense strand. In a further related embodiment, the DsiRNA comprises:

5′-XXXXXXXXXXXXXXXXXXXXXXXDD-3′
3′-XXXXXXXXXXXXXXXXXXXXXXXXXXX-5′

wherein “X”=RNA, “X”=2′-O-methyl RNA, and “D”=DNA. The top strand is the sense strand, and the bottom strand is the antisense strand. This modification pattern is also referred to herein as the “AS-M40” or “M40” modification pattern.

[0188] In additional embodiments, the DsiRNA comprises:

5′-XXXXXXXXXXXXXXXXXXXXXXXXX-3′
3′-YXXXXXXXXXXXXXXXXXXXXXXXXX-5′

wherein “X”=RNA, “X”=2′-O-methyl RNA, “Y” is an overhang domain comprised of 1-4 RNA monomers that are optionally 2′-O-methyl RNA monomers and underlined residues are 2′-O-methyl RNA monomers. The top strand is the sense strand, and the bottom strand is the antisense strand. In one related embodiment, the DsiRNA comprises:

5′-XXXXXXXXXXXXXXXXXXXXXXXDD-3′
3′-YXXXXXXXXXXXXXXXXXXXXXXXXX-5′

wherein “X”=RNA, “X”=2′-O-methyl RNA, “Y” is an overhang domain comprised of 1-4 RNA monomers that are optionally 2′-O-methyl RNA monomers, underlined residues are 2′-O-methyl RNA monomers, and “D”=DNA. The top strand is the sense strand, and the bottom strand is the antisense strand. In another related embodiment, the DsiRNA comprises:

5′-XXXXXXXXXXXXXXXXXXXXXXXXX-3′
3′-XXXXXXXXXXXXXXXXXXXXXXXXXXX-5′

wherein “X”=RNA and “X”=2′-O-methyl RNA. The top strand is the sense strand, and the bottom strand is the antisense strand. In a further related embodiment, the DsiRNA comprises:

5′-XXXXXXXXXXXXXXXXXXXXXXXDD-3′
3′-XXXXXXXXXXXXXXXXXXXXXXXXXXX-5′

wherein “X”=RNA, “X”=2′-O-methyl RNA, and “D”=DNA. The top strand is the sense strand, and the bottom strand is the antisense strand. This modification pattern is also referred to herein as the “AS-M41” or “M41” modification pattern.

[0189] In additional embodiments, the DsiRNA comprises:

5′-XXXXXXXXXXXXXXXXXXXXXXXXX-3′
3′-XXXXXXXXXXXXXXXXXXXXXXXXXXX-5′

wherein “X”=RNA and “X”=2′-O-methyl RNA. In a further related embodiment, the DsiRNA comprises:

5′-XXXXXXXXXXXXXXXXXXXXXXXDD-3′
3′-XXXXXXXXXXXXXXXXXXXXXXXXXXX-5′

wherein “X”=RNA, “X”=2′-O-methyl RNA, and “D”=DNA. The top strand is the sense strand, and the bottom strand is the antisense strand. This modification pattern is also referred to herein as the “AS-M7*” or “M7*” modification pattern.

[0190] In further embodiments, the DsiRNA comprises:

5′-XXXXXXXXXXXXXXXXXXXXXXXXX-3′
3′-XXXXXXXXXXXXXXXXXXXXXXXXXXX-5′

wherein “X”=RNA and “X”=2′-O-methyl RNA. The top strand is the sense strand, and the bottom strand is the antisense strand. In a further related embodiment, the DsiRNA comprises:

5′-XXXXXXXXXXXXXXXXXXXXXXXDD-3′
3′-XXXXXXXXXXXXXXXXXXXXXXXXXXX-5′

wherein “X”=RNA, “X”=2′-O-methyl RNA, and “D”=DNA. The top strand is the sense strand, and the bottom strand is the antisense strand. This modification pattern is also referred to herein as the “AS-M6*” or “M6*” modification pattern.

[0191] In other embodiments, the DsiRNA comprises:

5′-XXXXXXXXXXXXXXXXXXXXXXXXX-3′
3′-XXXXXXXXXXXXXXXXXXXXXXXXXXX-5′

wherein “X”=RNA and “X”=2′-O-methyl RNA. The top strand is the sense strand, and the bottom strand is the antisense strand. In another related embodiment, the DsiRNA comprises:

5′-XXXXXXXXXXXXXXXXXXXXXXXDD-3′
3′-XXXXXXXXXXXXXXXXXXXXXXXXXXX-5′

wherein “X”=RNA, “X”=2′-O-methyl RNA, and “D”=DNA. The top strand is the sense strand, and the bottom strand is the antisense strand. This modification pattern is also referred to herein as the “AS-M5*” or “M5*” modification pattern.

[0192] In further embodiments, the DsiRNA comprises:

5′-XXXXXXXXXXXXXXXXXXXXXXXXX-3′
3′-XXXXXXXXXXXXXXXXXXXXXXXXXXX-5′

wherein “X”=RNA and “X”=2′-O-methyl RNA. The top strand is the sense strand, and the bottom strand is the antisense strand. In a further related embodiment, the DsiRNA comprises:

5′-XXXXXXXXXXXXXXXXXXXXXXXDD-3′
3′-XXXXXXXXXXXXXXXXXXXXXXXXXXX-5′

wherein “X”=RNA, “X”=2′-O-methyl RNA, and “D”=DNA. The top strand is the sense strand, and the bottom strand is the antisense strand. This modification pattern is also referred to herein as the “AS-M4*” or “M4*” modification pattern.

[0193] In additional embodiments, the DsiRNA comprises:

5′-XXXXXXXXXXXXXXXXXXXXXXXXX-3′
3′-XXXXXXXXXXXXXXXXXXXXXXXXXXX-5′

wherein “X”=RNA and “X”=2′-O-methyl RNA. The top strand is the sense strand, and the bottom strand is the antisense strand. In a further related embodiment, the DsiRNA comprises:

5′-XXXXXXXXXXXXXXXXXXXXXXXDD-3′
3′-XXXXXXXXXXXXXXXXXXXXXXXXXXX-5′

wherein “X”=RNA, “X”=2′-O-methyl RNA, and “D”=DNA. The top strand is the sense strand, and the bottom strand is the antisense strand. This modification pattern is also referred to herein as the “AS-M8*” or “M8*” modification pattern.

[0194] In additional embodiments, the DsiRNA comprises:

5′-XXXXXXXXXXXXXXXXXXXXXXXXX-3′
3′-XXXXXXXXXXXXXXXXXXXXXXXXXXX-5′

wherein “X”=RNA and “X”=2′-O-methyl RNA. The top strand is the sense strand, and the bottom strand is the antisense strand. In a further related embodiment, the DsiRNA comprises:

5′-XXXXXXXXXXXXXXXXXXXXXXXDD-3′
3′-XXXXXXXXXXXXXXXXXXXXXXXXXXX-5′

wherein “X”=RNA, “X”=2′-O-methyl RNA, and “D”=DNA. The top strand is the sense strand, and the bottom strand is the antisense strand. This modification pattern is also referred to herein as the “AS-M2*” or “M2*” modification pattern.

[0195] In other embodiments, the DsiRNA comprises:

5′-XXXXXXXXXXXXXXXXXXXXXXXXX-3′
3′-XXXXXXXXXXXXXXXXXXXXXXXXXXX-5′

wherein “X”=RNA and “X”=2′-O-methyl RNA. The top strand is the sense strand, and the bottom strand is the antisense strand. In a further related embodiment, the DsiRNA comprises:

5′-XXXXXXXXXXXXXXXXXXXXXXXDD-3′
3′-XXXXXXXXXXXXXXXXXXXXXXXXXXX-5′

wherein “X”=RNA, “X”=2′-O-methyl RNA, and “D”=DNA. The top strand is the sense strand, and the bottom strand is the antisense strand. This modification pattern is also referred to herein as the “AS-M10*” or “M10*” modification pattern.

[0196] In further embodiments, the DsiRNA comprises:

5′-XXXXXXXXXXXXXXXXXXXXXXXXX-3′
3′-XXXXXXXXXXXXXXXXXXXXXXXXXXX-5′

wherein “X”=RNA and “X”=2′-O-methyl RNA. The top strand is the sense strand, and the bottom strand is the antisense strand. In a further related embodiment, the DsiRNA comprises:

5′-XXXXXXXXXXXXXXXXXXXXXXXDD-3′
3′-XXXXXXXXXXXXXXXXXXXXXXXXXXX-5′

wherein “X”=RNA, “X”=2′-O-methyl RNA, and “D”=DNA. The top strand is the sense strand, and the bottom strand is the antisense strand. This modification pattern is also referred to herein as the “AS-M11*” or “M11*” modification pattern.

[0197] In further embodiments, the DsiRNA comprises:

5′-XXXXXXXXXXXXXXXXXXXXXXXXX-3′
3′-XXXXXXXXXXXXXXXXXXXXXXXXXXX-5′

wherein “X”=RNA and “X”=2′-O-methyl RNA. The top strand is the sense strand, and the bottom strand is the antisense strand. In a further related embodiment, the DsiRNA comprises:

5′-XXXXXXXXXXXXXXXXXXXXXXXDD-3′
3′-XXXXXXXXXXXXXXXXXXXXXXXXXXX-5′

wherein “X”=RNA, “X”=2′-O-methyl RNA, and “D”=DNA. The top strand is the sense strand, and the bottom strand is the antisense strand. This modification pattern is also referred to herein as the “AS-M13*” or “M13*” modification pattern.

[0198] In further embodiments, the DsiRNA comprises:

5′-XXXXXXXXXXXXXXXXXXXXXXXXX-3′
3′-XXXXXXXXXXXXXXXXXXXXXXXXXXX-5′

wherein “X”=RNA and “X”=2′-O-methyl RNA. The top strand is the sense strand, and the bottom strand is the antisense strand. In a further related embodiment, the DsiRNA comprises:

5′-XXXXXXXXXXXXXXXXXXXXXXXDD-3′
3′-XXXXXXXXXXXXXXXXXXXXXXXXXXX-5′

wherein “X”=RNA, “X”=2′-O-methyl RNA, and “D”=DNA. The top strand is the sense strand, and the bottom strand is the antisense strand. This modification pattern is also referred to herein as the “AS-M14*” or “M14*” modification pattern.

[0199] In additional embodiments, the DsiRNA comprises:

5′-XXXXXXXXXXXXXXXXXXXXXXXXX-3′
3′-XXXXXXXXXXXXXXXXXXXXXXXXXXX-5′

wherein “X”=RNA and “X”=2′-O-methyl RNA. The top strand is the sense strand, and the bottom strand is the antisense strand. In a further related embodiment, the DsiRNA comprises:

5′-XXXXXXXXXXXXXXXXXXXXXXXDD-3′
3′-XXXXXXXXXXXXXXXXXXXXXXXXXXX-5′

wherein “X”=RNA, “X”=2′-O-methyl RNA, and “D”=DNA. The top strand is the sense strand, and the bottom strand is the antisense strand. This modification pattern is also referred to herein as the “AS-M15*” or “M15*” modification pattern.

[0200] In further embodiments, the DsiRNA comprises:

5′-XXXXXXXXXXXXXXXXXXXXXXXXX-3′
3′-XXXXXXXXXXXXXXXXXXXXXXXXXXX-5′

wherein “X”=RNA and “X”=2′-O-methyl RNA. The top strand is the sense strand, and the bottom strand is the antisense strand. In a further related embodiment, the DsiRNA comprises:

5′-XXXXXXXXXXXXXXXXXXXXXXXDD-3′
3′-XXXXXXXXXXXXXXXXXXXXXXXXXXX-5′

wherein “X”=RNA, “X”=2′-O-methyl RNA, and “D”=DNA. The top strand is the sense strand, and the bottom strand is the antisense strand. This modification pattern is also referred to herein as the “AS-M16*” or “M16*” modification pattern.

[0201] In additional embodiments, the DsiRNA comprises:

5′-XXXXXXXXXXXXXXXXXXXXXXXXX-3′
3′-XXXXXXXXXXXXXXXXXXXXXXXXXXX-5′

wherein “X”=RNA and “X”=2′-O-methyl RNA. The top strand is the sense strand, and the bottom strand is the antisense strand. In a further related embodiment, the DsiRNA comprises:

5′-XXXXXXXXXXXXXXXXXXXXXXXDD-3′
3′-XXXXXXXXXXXXXXXXXXXXXXXXXXX-5′

wherein “X”=RNA, “X”=2′-O-methyl RNA, and “D”=DNA. The top strand is the sense strand, and the bottom strand is the antisense strand. This modification pattern is also referred to herein as the “AS-M17*” or “M17*” modification pattern.

[0202] In further embodiments, the DsiRNA comprises:

5′-XXXXXXXXXXXXXXXXXXXXXXXXX-3′
3′-XXXXXXXXXXXXXXXXXXXXXXXXXXX-5′

wherein “X”=RNA and “X”=2′-O-methyl RNA. The top strand is the sense strand, and the bottom strand is the antisense strand. In a further related embodiment, the DsiRNA comprises:

5′-XXXXXXXXXXXXXXXXXXXXXXXDD-3′
3′-XXXXXXXXXXXXXXXXXXXXXXXXXXX-5′

wherein “X”=RNA, “X”=2′-O-methyl RNA, and “D”=DNA. The top strand is the sense strand, and the bottom strand is the antisense strand. This modification pattern is also referred to herein as the “AS-M18*” or “M18*” modification pattern.

[0203] In additional embodiments, the DsiRNA comprises:

5′-XXXXXXXXXXXXXXXXXXXXXXXXX-3′
3′-XXXXXXXXXXXXXXXXXXXXXXXXXXX-5′

wherein “X”=RNA and “X”=2′-O-methyl RNA. The top strand is the sense strand, and the bottom strand is the antisense strand. In a further related embodiment, the DsiRNA comprises:

5′-XXXXXXXXXXXXXXXXXXXXXXXDD-3′
3′-XXXXXXXXXXXXXXXXXXXXXXXXXXX-5′

wherein “X”=RNA, “X”=2′-O-methyl RNA, and “D”=DNA. The top strand is the sense strand, and the bottom strand is the antisense strand. This modification pattern is also referred to herein as the “AS-M19*” or “M19*” modification pattern.

[0204] In further embodiments, the DsiRNA comprises:

5′-XXXXXXXXXXXXXXXXXXXXXXXDD-3′
3′-YXXXXXXXXXXXXXXXXXXXXXXXXX-5′

wherein “X”=RNA, “X”=2′-O-methyl RNA, “Y” is an overhang domain comprised of 1-4 RNA monomers that are optionally 2′-O-methyl RNA monomers, underlined residues are 2′-O-methyl RNA monomers, and “D”=DNA. The top strand is the sense strand, and the bottom strand is the antisense strand. In another related embodiment, the DsiRNA comprises:

5′-XXXXXXXXXXXXXXXXXXXXXXXXX-3′
3′-XXXXXXXXXXXXXXXXXXXXXXXXXXX-5′

wherein “X”=RNA and “X”=2′-O-methyl RNA. The top strand is the sense strand, and the bottom strand is the antisense strand. In a further related embodiment, the DsiRNA comprises:

5′-XXXXXXXXXXXXXXXXXXXXXXXDD-3′
3′-XXXXXXXXXXXXXXXXXXXXXXXXXXX-5′

wherein “X”=RNA, “X”=2′-O-methyl RNA, and “D”=DNA. The top strand is the sense strand, and the bottom strand is the antisense strand. This modification pattern is also referred to herein as the “AS-M20*” or “M20*” modification pattern.

[0205] In additional embodiments, the DsiRNA comprises:

5′-XXXXXXXXXXXXXXXXXXXXXXXXX-3′
3′-XXXXXXXXXXXXXXXXXXXXXXXXXXX-5′

wherein “X”=RNA and “X”=2′-O-methyl RNA. The top strand is the sense strand, and the bottom strand is the antisense strand. In a further related embodiment, the DsiRNA comprises:

5′-XXXXXXXXXXXXXXXXXXXXXXXDD-3′
3′-XXXXXXXXXXXXXXXXXXXXXXXXXXX-5′

wherein “X”=RNA, “X”=2′-O-methyl RNA, and “D”=DNA. The top strand is the sense strand, and the bottom strand is the antisense strand. This modification pattern is also referred to herein as the “AS-M22*” or “M22*” modification pattern.

[0206] In further embodiments, the DsiRNA comprises:

5′-XXXXXXXXXXXXXXXXXXXXXXXXX-3′
3′-XXXXXXXXXXXXXXXXXXXXXXXXXXX-5′

wherein “X”=RNA and “X”=2′-O-methyl RNA. The top strand is the sense strand, and the bottom strand is the antisense strand. In a further related embodiment, the DsiRNA comprises:

5′-XXXXXXXXXXXXXXXXXXXXXXXDD-3′
3′-XXXXXXXXXXXXXXXXXXXXXXXXXXX-5′

wherein “X”=RNA, “X”=2′-O-methyl RNA, and “D”=DNA. The top strand is the sense strand, and the bottom strand is the antisense strand. This modification pattern is also referred to herein as the “AS-M24*” or “M24*” modification pattern.

[0207] In additional embodiments, the DsiRNA comprises:

5′-XXXXXXXXXXXXXXXXXXXXXXXXX-3′
3′-XXXXXXXXXXXXXXXXXXXXXXXXXXX-5′

wherein “X”=RNA and “X”=2′-O-methyl RNA. The top strand is the sense strand, and the bottom strand is the antisense strand. In a further related embodiment, the DsiRNA comprises:

5′-XXXXXXXXXXXXXXXXXXXXXXXDD-3′
3′-XXXXXXXXXXXXXXXXXXXXXXXXXXX-5′

wherein “X”=RNA, “X”=2′-O-methyl RNA, and “D”=DNA. The top strand is the sense strand, and the bottom strand is the antisense strand. This modification pattern is also referred to herein as the “AS-M25*” or “M25*” modification pattern.

[0208] In further embodiments, the DsiRNA comprises:

5′-XXXXXXXXXXXXXXXXXXXXXXXXX-3′
3′-XXXXXXXXXXXXXXXXXXXXXXXXXXX-5′

wherein “X”=RNA and “X”=2′-O-methyl RNA. The top strand is the sense strand, and the bottom strand is the antisense strand. In a further related embodiment, the DsiRNA comprises:

5′-XXXXXXXXXXXXXXXXXXXXXXXDD-3′
3′-XXXXXXXXXXXXXXXXXXXXXXXXXXX-5′

wherein “X”=RNA, “X”=2′-O-methyl RNA, and “D”=DNA. The top strand is the sense strand, and the bottom strand is the antisense strand. This modification pattern is also referred to herein as the “AS-M26*” or “M26*” modification pattern.

[0209] In additional embodiments, the DsiRNA comprises:

5′-XXXXXXXXXXXXXXXXXXXXXXXXX-3′
3′-XXXXXXXXXXXXXXXXXXXXXXXXXXX-5′

wherein “X”=RNA and “X”=2′-O-methyl RNA. The top strand is the sense strand, and the bottom strand is the antisense strand. In a further related embodiment, the DsiRNA comprises:

5′-XXXXXXXXXXXXXXXXXXXXXXXDD-3′
3′-XXXXXXXXXXXXXXXXXXXXXXXXXXX-5′

wherein “X”=RNA, “X”=2′-O-methyl RNA, and “D”=DNA. The top strand is the sense strand, and the bottom strand is the antisense strand. This modification pattern is also referred to herein as the “AS-M27*” or “M27*” modification pattern.

[0210] In additional embodiments, the DsiRNA comprises:

5′-XXXXXXXXXXXXXXXXXXXXXXXXX-3′
3′-XXXXXXXXXXXXXXXXXXXXXXXXXXX-5′

wherein “X”=RNA and “X”=2′-O-methyl RNA. The top strand is the sense strand, and the bottom strand is the antisense strand. In a further related embodiment, the DsiRNA comprises:

5′-XXXXXXXXXXXXXXXXXXXXXXXDD-3′
3′-XXXXXXXXXXXXXXXXXXXXXXXXXXX-5′

wherein “X”=RNA, “X”=2′-O-methyl RNA, and “D”=DNA. The top strand is the sense strand, and the bottom strand is the antisense strand. This modification pattern is also referred to herein as the “AS-M28*” or “M28*” modification pattern.

[0211] In further embodiments, the DsiRNA comprises:

5′-XXXXXXXXXXXXXXXXXXXXXXXXX-3′
3′-XXXXXXXXXXXXXXXXXXXXXXXXXXX-5′

wherein “X”=RNA and “X”=2′-O-methyl RNA. The top strand is the sense strand, and the bottom strand is the antisense strand. In a further related embodiment, the DsiRNA comprises:

5′-XXXXXXXXXXXXXXXXXXXXXXXDD-3′
3′-XXXXXXXXXXXXXXXXXXXXXXXXXXX-5′

wherein “X”=RNA, “X”=2′-O-methyl RNA, and “D”=DNA. The top strand is the sense strand, and the bottom strand is the antisense strand. This modification pattern is also referred to herein as the “AS-M29*” or “M29*” modification pattern.

[0212] In additional embodiments, the DsiRNA comprises:

5′-XXXXXXXXXXXXXXXXXXXXXXXXX-3′
3′-XXXXXXXXXXXXXXXXXXXXXXXXXXX-5′

wherein “X”=RNA and “X”=2′-O-methyl RNA. The top strand is the sense strand, and the bottom strand is the antisense strand. In a further related embodiment, the DsiRNA comprises:

5′-XXXXXXXXXXXXXXXXXXXXXXXDD-3′
3′-XXXXXXXXXXXXXXXXXXXXXXXXXXX-5′

wherein “X”=RNA, “X”=2′-O-methyl RNA, and “D”=DNA. The top strand is the sense strand, and the bottom strand is the antisense strand. This modification pattern is also referred to herein as the “AS-M34*” or “M34*” modification pattern.

[0213] In further embodiments, the DsiRNA comprises:

5′-XXXXXXXXXXXXXXXXXXXXXXXXX-3′
3′-XXXXXXXXXXXXXXXXXXXXXXXXXXX-5′

wherein “X”=RNA and “X”=2′-O-methyl RNA. The top strand is the sense strand, and the bottom strand is the antisense strand. In a further related embodiment, the DsiRNA comprises:

5′-XXXXXXXXXXXXXXXXXXXXXXXDD-3′
3′-XXXXXXXXXXXXXXXXXXXXXXXXXXX-5′

wherein “X”=RNA, “X”=2′-O-methyl RNA, and “D”=DNA. The top strand is the sense strand, and the bottom strand is the antisense strand. This modification pattern is also referred to herein as the “AS-M35*” or “M35*” modification pattern.

[0214] In additional embodiments, the DsiRNA comprises:

5′-XXXXXXXXXXXXXXXXXXXXXXXXX-3′
3′-XXXXXXXXXXXXXXXXXXXXXXXXXXX-5′

wherein “X”=RNA and “X”=2′-O-methyl RNA. The top strand is the sense strand, and the bottom strand is the antisense strand. In a further related embodiment, the DsiRNA comprises:

5′-XXXXXXXXXXXXXXXXXXXXXXXDD-3′
3′-XXXXXXXXXXXXXXXXXXXXXXXXXXX-5′

wherein “X”=RNA, “X”=2′-O-methyl RNA, and “D”=DNA. The top strand is the sense strand, and the bottom strand is the antisense strand. This modification pattern is also referred to herein as the “AS-M37*” or “M37*” modification pattern.

[0215] In further embodiments, the DsiRNA comprises:

5′-XXXXXXXXXXXXXXXXXXXXXXXXX-3′
3′-XXXXXXXXXXXXXXXXXXXXXXXXXXX-5′

wherein “X”=RNA and “X”=2′-O-methyl RNA. The top strand is the sense strand, and the bottom strand is the antisense strand. In a further related embodiment, the DsiRNA comprises:

5′-XXXXXXXXXXXXXXXXXXXXXXXDD-3′
3′-XXXXXXXXXXXXXXXXXXXXXXXXXXX-5′

wherein “X”=RNA, “X”=2′-O-methyl RNA, and “D”=DNA. The top strand is the sense strand, and the bottom strand is the antisense strand. This modification pattern is also referred to herein as the “AS-M38*” or “M38*” modification pattern.

[0216] In further embodiments, the DsiRNA comprises:

5′-XXXXXXXXXXXXXXXXXXXXXXXXX-3′
3′-XXXXXXXXXXXXXXXXXXXXXXXXXXX-5′

wherein “X”=RNA and “X”=2′-O-methyl RNA. The top strand is the sense strand, and the bottom strand is the antisense strand. In a further related embodiment, the DsiRNA comprises:

5′-XXXXXXXXXXXXXXXXXXXXXXXDD-3′
3′-XXXXXXXXXXXXXXXXXXXXXXXXXXX-5′

wherein “X”=RNA, “X”=2′-O-methyl RNA, and “D”=DNA. The top strand is the sense strand, and the bottom strand is the antisense strand. This modification pattern is also referred to herein as the “AS-M40*” or “M40*” modification pattern.

[0217] In additional embodiments, the DsiRNA comprises:

5′-XXXXXXXXXXXXXXXXXXXXXXXXX-3′
3′-XXXXXXXXXXXXXXXXXXXXXXXXXXX-5′

wherein “X”=RNA and “X”=2′-O-methyl RNA. The top strand is the sense strand, and the bottom strand is the antisense strand. In a further related embodiment, the DsiRNA comprises:

5′-XXXXXXXXXXXXXXXXXXXXXXXDD-3′
3′-XXXXXXXXXXXXXXXXXXXXXXXXXXX-5′

wherein “X”=RNA, “X”=2′-O-methyl RNA, and “D”=DNA. The top strand is the sense strand, and the bottom strand is the antisense strand. This modification pattern is also referred to herein as the “AS-M41*” or “M41*” modification pattern.

[0218] In certain embodiments, the sense strand of a DsiRNA of the invention is modified—specific exemplary forms of sense strand modifications are shown below, and it is contemplated that such modified sense strands can be substituted for the sense strand of any of the DsiRNAs shown above to generate a DsiRNA comprising a below-depicted sense strand that anneals with an above-depicted antisense strand. Exemplary sense strand modification patterns include:

5′-XXXXXXXXXXXXXXXXXXXXXXXDD-3′ “SM1”
5′-XXXXXXXXXXXXXXXXXXXXXXXDD-3′ “SM2”
5′-XXXXXXXXXXXXXXXXXXXXXXXDD-3′ “SM3”
5′-XXXXXXXXXXXXXXXXXXXXXXXDD-3′ “SM4”
5′-XXXXXXXXXXXXXXXXXXXXXXXDD-3′ “SM5”
5′-XXXXXXXXXXXXXXXXXXXXXXXDD-3′ “SM6”
5′-XXXXXXXXXXXXXXXXXXXXXXXDD-3′ “SM7”
5′-XXXXXXXXXXXXXXXXXXXXXXXDD-3′ “SM8”
5′-XXXXXXXXXXXXXXXXXXXXXXXDD-3′ “SM9”
5′-XXXXXXXXXXXXXXXXXXXXXXXDD-3′ “SM10”
5′-XXXXXXXXXXXXXXXXXXXXXXXDD-3′ “SM11”
5′-XXXXXXXXXXXXXXXXXXXXXXXDD-3′ “SM12”
5′-XXXXXXXXXXXXXXXXXXXXXXXDD-3′ “SM13”
5′-XXXXXXXXXXXXXXXXXXXXXXXDD-3′ “SM14”
5′-XXXXXXXXXXXXXXXXXXXXXXXDD-3′ “SM15”
5′-XXXXXXXXXXXXXXXXXXXXXXXDD-3′ “SM16”
5′-XXXXXXXXXXXXXXXXXXXXXXXXX-3′
5′-XXXXXXXXXXXXXXXXXXXXXXXXX-3′
5′-XXXXXXXXXXXXXXXXXXXXXXXXX-3′
5′-XXXXXXXXXXXXXXXXXXXXXXXXX-3′
5′-XXXXXXXXXXXXXXXXXXXXXXXXX-3′
5′-XXXXXXXXXXXXXXXXXXXXXXXXX-3′
5′-XXXXXXXXXXXXXXXXXXXXXXXXX-3′
5′-XXXXXXXXXXXXXXXXXXXXXXXXX-3′
5′-XXXXXXXXXXXXXXXXXXXXXXXXX-3′
5′-XXXXXXXXXXXXXXXXXXXXXXXXX-3′
5′-XXXXXXXXXXXXXXXXXXXXXXXXX-3′
5′-XXXXXXXXXXXXXXXXXXXXXXXXX-3′
5′-XXXXXXXXXXXXXXXXXXXXXXXXX-3′
5′-XXXXXXXXXXXXXXXXXXXXXXXXX-3′
5′-XXXXXXXXXXXXXXXXXXXXXXXXX-3′
5′-XXXXXXXXXXXXXXXXXXXXXXXXX-3′

where“X” = RNA, “X” = 2′-O-methyl RNA, and
“D” = DNA.

[0219] The above modification patterns can also be incorporated into, e.g., the extended DsiRNA structures and mismatch and/or frayed DsiRNA structures described below.

[0220] In another embodiment, the DsiRNA comprises strands having equal lengths possessing 1-3 mismatched residues that serve to orient Dicer cleavage (specifically, one or more of positions 1, 2 or 3 on the first strand of the DsiRNA, when numbering from the 3′-terminal residue, are mismatched with corresponding residues of the 5′-terminal region on the second strand when first and second strands are annealed to one another). An exemplary 27mer DsiRNA agent with two terminal mismatched residues is shown:

[chemical structure]

wherein “X”=RNA, “M”=Nucleic acid residues (RNA, DNA or non-natural or modified nucleic acids) that do not base pair (hydrogen bond) with corresponding “M” residues of otherwise complementary strand when strands are annealed. Any of the residues of such agents can optionally be 2′-O-methyl RNA monomers—alternating positioning of 2′-O-methyl RNA monomers that commences from the 3′-terminal residue of the bottom (second) strand, as shown for above asymmetric agents, can also be used in the above “blunt/fray” DsiRNA agent. In one embodiment, the top strand is the sense strand, and the bottom strand is the antisense strand. Alternatively, the bottom strand is the sense strand and the top strand is the antisense strand.

[0221] In certain additional embodiments, the present invention provides compositions for RNA interference (RNAi) that possess one or more base paired deoxyribonucleotides within a region of a double stranded ribonucleic acid (dsRNA) that is positioned 3′ of a projected sense strand Dicer cleavage site and correspondingly 5′ of a projected antisense strand Dicer cleavage site. The compositions of the invention comprise a dsRNA which is a precursor molecule, i.e., the dsRNA of the present invention is processed in vivo to produce an active small interfering nucleic acid (siRNA). The dsRNA is processed by Dicer to an active siRNA which is incorporated into RISC.

[0222] In certain embodiments, the DsiRNA agents of the invention can have the following exemplary structures (noting that any of the following exemplary structures can be combined, e.g., with the bottom strand modification patterns of the above-described structures—in one specific example, the bottom strand modification pattern shown in any of the above structures is applied to the 27 most 3′ residues of the bottom strand of any of the following structures; in another specific example, the bottom strand modification pattern shown in any of the above structures upon the 23 most 3′ residues of the bottom strand is applied to the 23 most 3′ residues of the bottom strand of any of the following structures):

[0223] In one such embodiment, the DsiRNA comprises the following (an exemplary “right-extended”, “DNA extended” DsiRNA):

5′-XXXXXXXXXXXXXXXXXXXXXXXX_{N*}D_{N}DD-3′
3′-YXXXXXXXXXXXXXXXXXXXXXXXX_{N*}D_{N}XX-5′

wherein “X”=RNA, “Y” is an optional overhang domain comprised of 0-10 RNA monomers that are optionally 2′-O-methyl RNA monomers—in certain embodiments, “Y” is an overhang domain comprised of 1-4 RNA monomers that are optionally 2′-O-methyl RNA monomers, “D”=DNA, and “N”=1 to 50 or more, but is optionally 1-8 or 1-10. “N*”=0 to 15 or more, but is optionally 0, 1, 2, 3, 4, 5 or 6. In one embodiment, the top strand is the sense strand, and the bottom strand is the antisense strand. Alternatively, the bottom strand is the sense strand and the top strand is the antisense strand.

[0224] In a related embodiment, the DsiRNA comprises:

5′-XXXXXXXXXXXXXXXXXXXXXXXX_{N*}D_{N}DD-3′
3′-YXXXXXXXXXXXXXXXXXXXXXXXX_{N*}D_{N}DD-5′

wherein “X”=RNA, “Y” is an optional overhang domain comprised of 0-10 RNA monomers that are optionally 2′-O-methyl RNA monomers—in certain embodiments, “Y” is an overhang domain comprised of 1-4 RNA monomers that are optionally 2′-O-methyl RNA monomers, “D”=DNA, and “N”=1 to 50 or more, but is optionally 1-8 or 1-10. “N*”=0 to 15 or more, but is optionally 0, 1, 2, 3, 4, 5 or 6. In one embodiment, the top strand is the sense strand, and the bottom strand is the antisense strand. Alternatively, the bottom strand is the sense strand and the top strand is the antisense strand.

[0225] In an additional embodiment, the DsiRNA comprises:

5′-XXXXXXXXXXXXXXXXXXXXXXXX_{N*}D_{N}DD-3′
3′-YXXXXXXXXXXXXXXXXXXXXXXXX_{N*}D_{N}ZZ-5′

wherein “X”=RNA, “X”=2′-O-methyl RNA, “Y” is an optional overhang domain comprised of 0-10 RNA monomers that are optionally 2′-O-methyl RNA monomers—in certain embodiments, “Y” is an overhang domain comprised of 1-4 RNA monomers that are optionally 2′-O-methyl RNA monomers, “D”=DNA, “Z”=DNA or RNA, and “N”=1 to 50 or more, but is optionally 1-8 or 1-10. “N*”=0 to 15 or more, but is optionally 0, 1, 2, 3, 4, 5 or 6. In one embodiment, the top strand is the sense strand, and the bottom strand is the antisense strand. Alternatively, the bottom strand is the sense strand and the top strand is the antisense strand, with 2′-O-methyl RNA monomers located at alternating residues along the top strand, rather than the bottom strand presently depicted in the above schematic.

[0226] In another such embodiment, the DsiRNA comprises:

5′-XXXXXXXXXXXXXXXXXXXXXXXX_{N*}D_{N}DD-3′
3′-YXXXXXXXXXXXXXXXXXXXXXXXX_{N*}D_{N}ZZ-5′

wherein “X”=RNA, “X”=2′-O-methyl RNA, “Y” is an optional overhang domain comprised of 0-10 RNA monomers that are optionally 2′-O-methyl RNA monomers—in certain embodiments, “Y” is an overhang domain comprised of 1-4 RNA monomers that are optionally 2′-O-methyl RNA monomers, “D”=DNA, “Z”=DNA or RNA, and “N”=1 to 50 or more, but is optionally 1-8 or 1-10. “N*”=0 to 15 or more, but is optionally 0, 1, 2, 3, 4, 5 or 6. In one embodiment, the top strand is the sense strand, and the bottom strand is the antisense strand. Alternatively, the bottom strand is the sense strand and the top strand is the antisense strand, with 2′-O-methyl RNA monomers located at alternating residues along the top strand, rather than the bottom strand presently depicted in the above schematic.

[0227] In another such embodiment, the DsiRNA comprises:

5′-XXXXXXXXXXXXXXXXXXXXXXXX_{N*}D_{N}DD-3′
3′-YXXXXXXXXXXXXXXXXXXXXXXXX_{N*}D_{N}ZZ-5′

wherein “X”=RNA, “X”=2′-O-methyl RNA, “Y” is an optional overhang domain comprised of 0-10 RNA monomers that are optionally 2′-O-methyl RNA monomers—in certain embodiments, “Y” is an overhang domain comprised of 1-4 RNA monomers that are optionally 2′-O-methyl RNA monomers, “D”=DNA, “Z”=DNA or RNA, and “N”=1 to 50 or more, but is optionally 1-8 or 1-10. “N*”=0 to 15 or more, but is optionally 0, 1, 2, 3, 4, 5 or 6. In one embodiment, the top strand is the sense strand, and the bottom strand is the antisense strand. Alternatively, the bottom strand is the sense strand and the top strand is the antisense strand, with 2′-O-methyl RNA monomers located at alternating residues along the top strand, rather than the bottom strand presently depicted in the above schematic.

[0228] In another embodiment, the DsiRNA comprises:

5′-XXXXXXXXXXXXXXXXXXXXXXXX_{N*}[X1/D1]_{N}DD-3′
3′-YXXXXXXXXXXXXXXXXXXXXXXXX_{N*}[X2/D2]_{N}ZZ-5′

wherein “X”=RNA, “Y” is an optional overhang domain comprised of 0-10 RNA monomers that are optionally 2′-O-methyl RNA monomers—in certain embodiments, “Y” is an overhang domain comprised of 1-4 RNA monomers that are optionally 2′-O-methyl RNA monomers, “D”=DNA, “Z”=DNA or RNA, and “N”=1 to 50 or more, but is optionally 1-8 or 1-10, where at least one D1_{N} is present in the top strand and is base paired with a corresponding D2_{N} in the bottom strand. Optionally, D1_{N} and D1_{N+1} are base paired with corresponding D2_{N} and D2_{N+1}; D1_{N}, D1_{N+1} and D1_{N+2} are base paired with corresponding D2_{N}, D1_{N+1} and D1_{N+2}, etc. “N*”=0 to 15 or more, but is optionally 0, 1, 2, 3, 4, 5 or 6. In one embodiment, the top strand is the sense strand, and the bottom strand is the antisense strand. Alternatively, the bottom strand is the sense strand and the top strand is the antisense strand, with 2′-O-methyl RNA monomers located at alternating residues along the top strand, rather than the bottom strand presently depicted in the above schematic.

[0229] In the structures depicted herein, the 5′ end of either the sense strand or antisense strand can optionally comprise a phosphate group.

[0230] In another embodiment, a DNA:DNA-extended DsiRNA comprises strands having equal lengths possessing 1-3 mismatched residues that serve to orient Dicer cleavage (specifically, one or more of positions 1, 2 or 3 on the first strand of the DsiRNA, when numbering from the 3′-terminal residue, are mismatched with corresponding residues of the 5′-terminal region on the second strand when first and second strands are annealed to one another). An exemplary DNA:DNA-extended DsiRNA agent with two terminal mismatched residues is shown:

[chemical structure]

wherein “X”=RNA, “M”=Nucleic acid residues (RNA, DNA or non-natural or modified nucleic acids) that do not base pair (hydrogen bond) with corresponding “M” residues of otherwise complementary strand when strands are annealed, “D”=DNA and “N”=1 to 50 or more, but is optionally 1-15 or, optionally, 1-8. “N*”=0 to 15 or more, but is optionally 0, 1, 2, 3, 4, 5 or 6. Any of the residues of such agents can optionally be 2′-O-methyl RNA monomers—alternating positioning of 2′-O-methyl RNA monomers that commences from the 3′-terminal residue of the bottom (second) strand, as shown for above asymmetric agents, can also be used in the above “blunt/fray” DsiRNA agent. In one embodiment, the top strand (first strand) is the sense strand, and the bottom strand (second strand) is the antisense strand. Alternatively, the bottom strand is the sense strand and the top strand is the antisense strand. Modification and DNA:DNA extension patterns paralleling those shown above for asymmetric/overhang agents can also be incorporated into such “blunt/frayed” agents.

[0231] In one embodiment, a length-extended DsiRNA agent is provided that comprises deoxyribonucleotides positioned at sites modeled to function via specific direction of Dicer cleavage, yet which does not require the presence of a base-paired deoxyribonucleotide in the dsRNA structure. An exemplary structure for such a molecule is shown:

5′-XXXXXXXXXXXXXXXXXXXDDXX-3′
3′-YXXXXXXXXXXXXXXXXXDDXXXX-5′

wherein “X”=RNA, “Y” is an optional overhang domain comprised of 0-10 RNA monomers that are optionally 2′-O-methyl RNA monomers—in certain embodiments, “Y” is an overhang domain comprised of 1-4 RNA monomers that are optionally 2′-O-methyl RNA monomers, and “D”=DNA. In one embodiment, the top strand is the sense strand, and the bottom strand is the antisense strand. Alternatively, the bottom strand is the sense strand and the top strand is the antisense strand. The above structure is modeled to force Dicer to cleave a minimum of a 21mer duplex as its primary post-processing form. In embodiments where the bottom strand of the above structure is the antisense strand, the positioning of two deoxyribonucleotide residues at the ultimate and penultimate residues of the 5′ end of the antisense strand will help reduce off-target effects (as prior studies have shown a 2′-O-methyl modification of at least the penultimate position from the 5′ terminus of the antisense strand to reduce off-target effects; see, e.g., US 2007/0223427).

[0232] In one embodiment, the DsiRNA comprises the following (an exemplary “left-extended”, “DNA extended” DsiRNA):

5′-D_{N}XXXXXXXXXXXXXXXXXXXXXXXX_{N*}Y-3′
3′-D_{N}XXXXXXXXXXXXXXXXXXXXXXXX_{N*}-5′

wherein “X”=RNA, “Y” is an optional overhang domain comprised of 0-10 RNA monomers that are optionally 2′-O-methyl RNA monomers—in certain embodiments, “Y” is an overhang domain comprised of 1-4 RNA monomers that are optionally 2′-O-methyl RNA monomers, “D”=DNA, and “N”=1 to 50 or more, but is optionally 1-8 or 1-10. “N*”=0 to 15 or more, but is optionally 0, 1, 2, 3, 4, 5 or 6. In one embodiment, the top strand is the sense strand, and the bottom strand is the antisense strand. Alternatively, the bottom strand is the sense strand and the top strand is the antisense strand.

[0233] In a related embodiment, the DsiRNA comprises:

5′-D_{N}XXXXXXXXXXXXXXXXXXXXXXXX_{N*}DD-3′
3′-D_{N}XXXXXXXXXXXXXXXXXXXXXXXX_{N*}XX-5′

wherein “X”=RNA, optionally a 2′-O-methyl RNA monomers “D”=DNA, “N”=1 to 50 or more, but is optionally 1-8 or 1-10. “N*”=0 to 15 or more, but is optionally 0, 1, 2, 3, 4, 5 or 6. In one embodiment, the top strand is the sense strand, and the bottom strand is the antisense strand. Alternatively, the bottom strand is the sense strand and the top strand is the antisense strand.

[0234] In an additional embodiment, the DsiRNA comprises:

5′-D_{N}XXXXXXXXXXXXXXXXXXXXXXXX_{N*}DD-3′
3′-D_{N}XXXXXXXXXXXXXXXXXXXXXXXX_{N*}ZZ-5′

wherein “X”=RNA, optionally a 2′-O-methyl RNA monomers “D”=DNA, “N”=1 to 50 or more, but is optionally 1-8 or 1-10. “N*”=0 to 15 or more, but is optionally 0, 1, 2, 3, 4, 5 or 6. “Z”=DNA or RNA. In one embodiment, the top strand is the sense strand, and the bottom strand is the antisense strand. Alternatively, the bottom strand is the sense strand and the top strand is the antisense strand, with 2′-O-methyl RNA monomers located at alternating residues along the top strand, rather than the bottom strand presently depicted in the above schematic.

[0235] In another such embodiment, the DsiRNA comprises:

5′-D_{N}XXXXXXXXXXXXXXXXXXXXXXXX_{N*}DD-3′
3′-D_{N}XXXXXXXXXXXXXXXXXXXXXXXX_{N*}ZZ-5′

wherein “X”=RNA, optionally a 2′-O-methyl RNA monomers “D”=DNA, “N”=1 to 50 or more, but is optionally 1-8 or 1-10. “N*”=0 to 15 or more, but is optionally 0, 1, 2, 3, 4, 5 or 6. “Z”=DNA or RNA. In one embodiment, the top strand is the sense strand, and the bottom strand is the antisense strand. Alternatively, the bottom strand is the sense strand and the top strand is the antisense strand, with 2′-O-methyl RNA monomers located at alternating residues along the top strand, rather than the bottom strand presently depicted in the above schematic.

[0236] In another such embodiment, the DsiRNA comprises:

5′-D_{N}ZZXXXXXXXXXXXXXXXXXXXXXXXX_{N*}DD-3′
3′-D_{N}XXXXXXXXXXXXXXXXXXXXXXXXXX_{N*}ZZ-5′

wherein “X”=RNA, “X”=2′-O-methyl RNA, “D”=DNA, “Z”=DNA or RNA, and “N”=1 to 50 or more, but is optionally 1-8 or 1-10. “N*”=0 to 15 or more, but is optionally 0, 1, 2, 3, 4, 5 or 6. In one embodiment, the top strand is the sense strand, and the bottom strand is the antisense strand. Alternatively, the bottom strand is the sense strand and the top strand is the antisense strand, with 2′-O-methyl RNA monomers located at alternating residues along the top strand, rather than the bottom strand presently depicted in the above schematic.

[0237] In another such embodiment, the DsiRNA comprises:

5′-D_{N}ZZXXXXXXXXXXXXXXXXXXXXXXXX_{N*}Y-3′
3′-D_{N}XXXXXXXXXXXXXXXXXXXXXXXXXX_{N*}-5′

wherein “X”=RNA, “X”=2′-O-methyl RNA, “D”=DNA, “Z”=DNA or RNA, and “N”=1 to 50 or more, but is optionally 1-8 or 1-10. “N*”=0 to 15 or more, but is optionally 0, 1, 2, 3, 4, 5 or 6. “Y” is an optional overhang domain comprised of 0-10 RNA monomers that are optionally 2′-O-methyl RNA monomers—in certain embodiments, “Y” is an overhang domain comprised of 1-4 RNA monomers that are optionally 2′-O-methyl RNA monomers. In one embodiment, the top strand is the sense strand, and the bottom strand is the antisense strand. Alternatively, the bottom strand is the sense strand and the top strand is the antisense strand, with 2′-O-methyl RNA monomers located at alternating residues along the top strand, rather than the bottom strand presently depicted in the above schematic.

[0238] In another embodiment, the DsiRNA comprises:

5′-[X1/D1]_{N}XXXXXXXXXXXXXXXXXXXXXXXX_{N*}DD-3′
3′-[X2/D2]_{N}XXXXXXXXXXXXXXXXXXXXXXXX_{N*}ZZ-5′

wherein “X”=RNA, “D”=DNA, “Z”=DNA or RNA, and “N”=1 to 50 or more, but is optionally 1-8 or 1-10, where at least one D1_{N} is present in the top strand and is base paired with a corresponding D2_{N} in the bottom strand. Optionally, D1_{N} and D1_{N+1} are base paired with corresponding D2_{N} and D2_{N+1}; D1_{N}, D1_{N+1} and D1_{N+2} are base paired with corresponding D2_{N}, D1_{N+1} and D1_{N+2}, etc. “N*”=0 to 15 or more, but is optionally 0, 1, 2, 3, 4, 5 or 6. In one embodiment, the top strand is the sense strand, and the bottom strand is the antisense strand. Alternatively, the bottom strand is the sense strand and the top strand is the antisense strand, with 2′-O-methyl RNA monomers located at alternating residues along the top strand, rather than the bottom strand presently depicted in the above schematic.

[0239] In a related embodiment, the DsiRNA comprises:

5′-[X1/D1]_{N}XXXXXXXXXXXXXXXXXXXXXXXX_{N*}Y-3′
3′-[X2/D2]_{N}XXXXXXXXXXXXXXXXXXXXXXXX_{N*}-5′

wherein “X”=RNA, “D”=DNA, “Y” is an optional overhang domain comprised of 0-10 RNA monomers that are optionally 2′-O-methyl RNA monomers—in certain embodiments, “Y” is an overhang domain comprised of 1-4 RNA monomers that are optionally 2′-O-methyl RNA monomers, and “N”=1 to 50 or more, but is optionally 1-8 or 1-10, where at least one D1_{N} is present in the top strand and is base paired with a corresponding D2_{N} in the bottom strand. Optionally, D1ₓ and D1_{N+1} are base paired with corresponding D2_{N} and D2_{N+1}; D1ₓ, D1_{N+1} and D1_{N+2} are base paired with corresponding D2_{N}, D1_{N+1} and D1_{N+2}, etc. “N*”=0 to 15 or more, but is optionally 0, 1, 2, 3, 4, 5 or 6. In one embodiment, the top strand is the sense strand, and the bottom strand is the antisense strand. Alternatively, the bottom strand is the sense strand and the top strand is the antisense strand, with 2′-O-methyl RNA monomers located at alternating residues along the top strand, rather than the bottom strand presently depicted in the above schematic.

[0240] In another embodiment, the DNA:DNA-extended DsiRNA comprises strands having equal lengths possessing 1-3 mismatched residues that serve to orient Dicer cleavage (specifically, one or more of positions 1, 2 or 3 on the first strand of the DsiRNA, when numbering from the 3′-terminal residue, are mismatched with corresponding residues of the 5′-terminal region on the second strand when first and second strands are annealed to one another). An exemplary DNA:DNA-extended DsiRNA agent with two terminal mismatched residues is shown:

[chemical structure]

wherein “X”=RNA, “M”=Nucleic acid residues (RNA, DNA or non-natural or modified nucleic acids) that do not base pair (hydrogen bond) with corresponding “M” residues of otherwise complementary strand when strands are annealed, “D”=DNA and “N”=1 to 50 or more, but is optionally 1-8 or 1-10. “N*”=0 to 15 or more, but is optionally 0, 1, 2, 3, 4, 5 or 6. Any of the residues of such agents can optionally be 2′-O-methyl RNA monomers—alternating positioning of 2′-O-methyl RNA monomers that commences from the 3′-terminal residue of the bottom (second) strand, as shown for above asymmetric agents, can also be used in the above “blunt/fray” DsiRNA agent. In one embodiment, the top strand (first strand) is the sense strand, and the bottom strand (second strand) is the antisense strand. Alternatively, the bottom strand is the sense strand and the top strand is the antisense strand. Modification and DNA:DNA extension patterns paralleling those shown above for asymmetric/overhang agents can also be incorporated into such “blunt/frayed” agents.

[0241] In another embodiment, a length-extended DsiRNA agent is provided that comprises deoxyribonucleotides positioned at sites modeled to function via specific direction of Dicer cleavage, yet which does not require the presence of a base-paired deoxyribonucleotide in the dsRNA structure. Exemplary structures for such a molecule are shown:

5′-XXDDXXXXXXXXXXXXXXXXXXXX_{N*}Y-3′
3′-DDXXXXXXXXXXXXXXXXXXXXXX_{N*}-5′
or
5′-XDXDXXXXXXXXXXXXXXXXXXXX_{N*}Y-3′
3′-DXDXXXXXXXXXXXXXXXXXXXXX_{N*}-5′

wherein “X”=RNA, “Y” is an optional overhang domain comprised of 0-10 RNA monomers that are optionally 2′-O-methyl RNA monomers—in certain embodiments, “Y” is an overhang domain comprised of 1-4 RNA monomers that are optionally 2′-O-methyl RNA monomers, and “D”=DNA. “N*”=0 to 15 or more, but is optionally 0, 1, 2, 3, 4, 5 or 6. In one embodiment, the top strand is the sense strand, and the bottom strand is the antisense strand. Alternatively, the bottom strand is the sense strand and the top strand is the antisense strand.

[0242] In any of the above embodiments where the bottom strand of the above structure is the antisense strand, the positioning of two deoxyribonucleotide residues at the ultimate and penultimate residues of the 5′ end of the antisense strand will help reduce off-target effects (as prior studies have shown a 2′-O-methyl modification of at least the penultimate position from the 5′ terminus of the antisense strand to reduce off-target effects; see, e.g., US 2007/0223427).

[0243] In certain embodiments, the “D” residues of the above structures include at least one PS-DNA or PS-RNA. Optionally, the “D” residues of the above structures include at least one modified nucleotide that inhibits Dicer cleavage.

[0244] While the above-described “DNA-extended” DsiRNA agents can be categorized as either “left extended” or “right extended”, DsiRNA agents comprising both left- and right-extended DNA-containing sequences within a single agent (e.g., both flanks surrounding a core dsRNA structure are dsDNA extensions) can also be generated and used in similar manner to those described herein for “right-extended” and “left-extended” agents.

[0245] In some embodiments, the DsiRNA of the instant invention further comprises a linking moiety or domain that joins the sense and antisense strands of a DNA:DNA-extended DsiRNA agent. Optionally, such a linking moiety domain joins the 3′ end of the sense strand and the 5′ end of the antisense strand. The linking moiety may be a chemical (non-nucleotide) linker, such as an oligomethylenediol linker, oligoethylene glycol linker, or other art-recognized linker moiety. Alternatively, the linker can be a nucleotide linker, optionally including an extended loop and/or tetraloop.

[0246] In one embodiment, the DsiRNA agent has an asymmetric structure, with the sense strand having a 25-base pair length, and the antisense strand having a 27-base pair length with a 1-4 base 3′-overhang (e.g., a one base 3′-overhang, a two base 3′-overhang, a three base 3′-overhang or a four base 3′-overhang). In another embodiment, this DsiRNA agent has an asymmetric structure further containing 2 deoxynucleotides at the 3′ end of the sense strand.

[0247] In another embodiment, the DsiRNA agent has an asymmetric structure, with the antisense strand having a 25-base pair length, and the sense strand having a 27-base pair length with a 1-4 base 3′-overhang (e.g., a one base 3′-overhang, a two base 3′-overhang, a three base 3′-overhang or a four base 3′-overhang). In another embodiment, this DsiRNA agent has an asymmetric structure further containing 2 deoxyribonucleotides at the 3′ end of the antisense strand.

[0248] Exemplary EGFR targeting DsiRNA agents of the invention, and their associated EGFR target sequences, include the following, presented in the below series of tables:

### Table Number:

### (2) Selected Human Anti-EGFR DsiRNA Agents (Asymmetrics);

### (3) Selected Human Anti-EGFR DsiRNAs, Unmodified Duplexes (Asymmetrics);

### (4) Selected Mouse Anti-EGFR DsiRNAs (Asymmetrics);

### (5) Selected Mouse Anti-EGFR DsiRNAs, Unmodified Duplexes (Asymmetrics);

[0249] (6) DsiRNA Target Sequences (21mers) in EGFR;

### (7) Selected Human Anti-EGFR “Blunt/Fray” DsiRNAs;

### (8) Selected Mouse Anti-EGFR “Blunt/Fray” DsiRNAs;

### (9) Selected Human Anti-EGFR “Blunt/Blunt” DsiRNAs; and

### (10) Selected Mouse Anti-EGFR “Blunt/Blunt” DsiRNAs.

TABLE 2
Selected Human Anti-EGFR DsiRNA Agents (Asymmetrics)

| | | |
|---|---|---|
| | 5′-CGCAGCGCGGCCGCAGCAGCCUCcg-3′ | (SEQ ID NO: 1) |
| | 3′-CCGCGUCGCGCCGGCGUCGUCGGAGGC-5′ | (SEQ ID NO: 357) |
| EGFR-31 Target: | 5′-GGCGCAGCGCGGCCGCAGCAGCCTCCG-3′ | (SEQ ID NO: 713) |
| | 5′-GCAGCGCGGCCGCAGCAGCCUCCgc-3′ | (SEQ ID NO: 2) |
| | 3′-CGCGUCGCGCCGGCGUCGUCGGAGGCG-5′ | (SEQ ID NO: 358) |
| EGFR-32 Target: | 5′-GCGCAGCGCGGCCGCAGCAGCCTCCGC-3′ | (SEQ ID NO: 714) |
| | 5′-AGCGCGGCCGCAGCAGCCUCCGCcc-3′ | (SEQ ID NO: 3) |
| | 3′-CGUCGCGCCGGCGUCGUCGGAGGCGGG-5′ | (SEQ ID NO: 359) |
| EGFR-34 Target: | 5′-GCAGCGCGGCCGCAGCAGCCTCCGCCC-3′ | (SEQ ID NO: 715) |
| | 5′-GCGCUCCUGGCGCUGCUGGCUGCgc-3′ | (SEQ ID NO: 4) |
| | 3′-GUCGCGAGGACCGCGACGACCGACGCG-5′ | (SEQ ID NO: 360) |
| EGFR-298 Target: | 5′-CAGCGCTCCTGGCGCTGCTGGCTGCGC-3′ | (SEQ ID NO: 716) |
| | 5′-GCUCCUGGCGCUGCUGGCUGCGCtc-3′ | (SEQ ID NO: 5) |
| | 3′-CGCGAGGACCGCGACGACCGACGCGAG-5′ | (SEQ ID NO: 361) |
| EGFR-300 Target: | 5′-GCGCTCCTGGCGCTGCTGGCTGCGCTC-3′ | (SEQ ID NO: 717) |
| | 5′-UCCUGGCGCUGCUGGCUGCGCUCtg-3′ | (SEQ ID NO: 6) |
| | 3′-CGAGGACCGCGACGACCGACGCGAGAC-5′ | (SEQ ID NO: 362) |
| EGFR-302 Target: | 5′-GCTCCTGGCGCTGCTGGCTGCGCTCTG-3′ | (SEQ ID NO: 718) |
| | 5′-GUUGGGCACUUUUGAAGAUCAUUtt-3′ | (SEQ ID NO: 7) |
| | 3′-GUCAACCCGUGAAAACUUCUAGUAAAA-5′ | (SEQ ID NO: 363) |
| EGFR-390 Target: | 5′-CAGTTGGGCACTTTTGAAGATCATTTT-3′ | (SEQ ID NO: 719) |
| | 5′-GGAAUUUGGAAAUUACCUAUGUGca-3′ | (SEQ ID NO: 8) |
| | 3′-ACCCUUAAACCUUUAAUGGAUACACGU-5′ | (SEQ ID NO: 364) |
| EGFR-458 Target: | 5′-TGGGAATTTGGAAATTACCTATGTGCA-3′ | (SEQ ID NO: 720) |
| | 5′-UUAUGAUCUUUCCUUCUUAAAGAcc-3′ | (SEQ ID NO: 9) |
| | 3′-UUAAUACUAGAAAGGAAGAAUUUCUGG-5′ | (SEQ ID NO: 365) |
| EGFR-489 Target: | 5′-AATTATGATCTTTCCTTCTTAAAGACC-3′ | (SEQ ID NO: 721) |
| | 5′-GGCUGGUUAUGUCCUCAUUGCCCtc-3′ | (SEQ ID NO: 10) |
| | 3′-CACCGACCAAUACAGGAGUAACGGGAG-5′ | (SEQ ID NO: 366) |
| EGFR-525 Target: | 5′-GTGGCTGGTTATGTCCTCATTGCCCTC-3′ | (SEQ ID NO: 722) |
| | 5′-CCCAUGAGAAAUUUACAGGAAAUcc-3′ | (SEQ ID NO: 11) |
| | 3′-ACGGGUACUCUUUAAAUGUCCUUUAGG-5′ | (SEQ ID NO: 367) |
| EGFR-676 Target: | 5′-TGCCCATGAGAAATTTACAGGAAATCC-3′ | (SEQ ID NO: 723) |
| | 5′-UGCAUGGCGCCGUGCGGUUCAGCaa-3′ | (SEQ ID NO: 12) |
| | 3′-GGACGUACCGCGGCACGCCAAGUCGUU-5′ | (SEQ ID NO: 368) |
| EGFR-701 Target: | 5′-CCTGCATGGCGCCGTGCGGTTCAGCAA-3′ | (SEQ ID NO: 724) |
| | 5′-GCGCCGUGCGGUUCAGCAACAACcc-3′ | (SEQ ID NO: 13) |
| | 3′-ACCGCGGCACGCCAAGUCGUUGUUGGG-5′ | (SEQ ID NO: 369) |
| EGFR-707 Target: | 5′-TGGCGCCGTGCGGTTCAGCAACAACCC-3′ | (SEQ ID NO: 725) |
| | 5′-GCGCCGUGCGGUUCAGCAACAACcc-3′ | (SEQ ID NO: 14) |
| | 3′-ACCGCGGCACGCCAAGUCGUUGUUGGG-5′ | (SEQ ID NO: 370) |
| EGFR-707 Target: | 5′-TGGCGCCGTGCGGTTCAGCAACAACCC-3′ | (SEQ ID NO: 726) |
| | 5′-GCCGUGCGGUUCAGCAACAACCCtg-3′ | (SEQ ID NO: 15) |
| | 3′-CGCGGCACGCCAAGUCGUUGUUGGGAC-5′ | (SEQ ID NO: 371) |
| EGFR-709 Target: | 5′-GCGCCGTGCGGTTCAGCAACAACCCTG-3′ | (SEQ ID NO: 727) |
| | 5′-CCGUGCGGUUCAGCAACAACCCUgc-3′ | (SEQ ID NO: 16) |
| | 3′-GCGGCACGCCAAGUCGUUGUUGGGACG-5′ | (SEQ ID NO: 372) |
| EGFR-710 Target: | 5′-CGCCGTGCGGTTCAGCAACAACCCTGC-3′ | (SEQ ID NO: 728) |
| | 5′-GCUGCCAAAAGUGUGAUCCAAGCtg-3′ | (SEQ ID NO: 17) |
| | 3′-GUCGACGGUUUUCACACUAGGUUCGAC-5′ | (SEQ ID NO: 373) |
| EGFR-827 Target: | 5′-CAGCTGCCAAAAGTGTGATCCAAGCTG-3′ | (SEQ ID NO: 729) |
| | 5′-CUGUGCCCAGCAGUGCUCCGGGCgc-3′ | (SEQ ID NO: 18) |
| | 3′-UAGACACGGGUCGUCACGAGGCCCGCG-5′ | (SEQ ID NO: 374) |
| EGFR-912 Target: | 5′-ATCTGTGCCCAGCAGTGCTCCGGGCGC-3′ | (SEQ ID NO: 730) |
| | 5′-GUGCCCAGCAGUGCUCCGGGCGCtg-3′ | (SEQ ID NO: 19) |
| | 3′-GACACGGGUCGUCACGAGGCCCGCGAC-5′ | (SEQ ID NO: 375) |
| EGFR-914 Target: | 5′-CTGTGCCCAGCAGTGCTCCGGGCGCTG-3′ | (SEQ ID NO: 731) |
| | 5′-GCUCCGGGCGCUGCCGUGGCAAGtc-3′ | (SEQ ID NO: 20) |
| | 3′-CACGAGGCCCGCGACGGCACCGUUCAG-5′ | (SEQ ID NO: 376) |
| EGFR-926 Target: | 5′-GTGCTCCGGGCGCTGCCGTGGCAAGTC-3′ | (SEQ ID NO: 732) |
| | 5′-GAGCGACUGCCUGGUCUGCCGCAaa-3′ | (SEQ ID NO: 21) |
| | 3′-CUCUCGCUGACGGACCAGACGGCGUUU-5′ | (SEQ ID NO: 377) |
| EGFR-1005 Target: | 5′-GAGAGCGACTGCCTGGTCTGCCGCAAA-3′ | (SEQ ID NO: 733) |
| | 5′-GCCUGGUCUGCCGCAAAUUCCGAga-3′ | (SEQ ID NO: 22) |
| | 3′-GACGGACCAGACGGCGUUUAAGGCUCU-5′ | (SEQ ID NO: 378) |
| EGFR-1013 Target: | 5′-CTGCCTGGTCTGCCGCAAATTCCGAGA-3′ | (SEQ ID NO: 734) |
| | 5′-CAGAUCACGGCUCGUGCGUCCGAgc-3′ | (SEQ ID NO: 23) |
| | 3′-CUGUCUAGUGCCGAGCACGCAGGCUCG-5′ | (SEQ ID NO: 379) |
| EGFR-1175 Target: | 5′-GACAGATCACGGCTCGTGCGTCCGAGC-3′ | (SEQ ID NO: 735) |
| | 5′-GCAAAGUGUGUAACGGAAUAGGUat-3′ | (SEQ ID NO: 24) |
| | 3′-GGCGUUUCACACAUUGCCUUAUCCAUA-5′ | (SEQ ID NO: 380) |
| EGFR-1271 Target: | 5′-CCGCAAAGTGTGTAACGGAATAGGTAT-3′ | (SEQ ID NO: 736) |
| | 5′-GAAUAGGUAUUGGUGAAUUUAAAga-3′ | (SEQ ID NO: 25) |
| | 3′-GCCUUAUCCAUAACCACUUAAAUUUCU-5′ | (SEQ ID NO: 381) |
| EGFR-1286 Target: | 5′-CGGAATAGGTATTGGTGAATTTAAAGA-3′ | (SEQ ID NO: 737) |
| | 5′-ACGAAUAUUAAACACUUCAAAAAct-3′ | (SEQ ID NO: 26) |
| | 3′-GAUGCUUAUAAUUUGUGAAGUUUUUGA-5′ | (SEQ ID NO: 382) |
| EGFR-1330 Target: | 5′-CTACGAATATTAAACACTTCAAAAACT-3′ | (SEQ ID NO: 738) |
| | 5′-ACAGGAACUGGAUAUUCUGAAAAcc-3′ | (SEQ ID NO: 27) |
| | 3′-GGUGUCCUUGACCUAUAAGACUUUUGG-5′ | (SEQ ID NO: 383) |
| EGFR-1437 Target: | 5′-CCACAGGAACTGGATATTCTGAAAACC-3′ | (SEQ ID NO: 739) |
| | 5′-CAGGGUUUUUGCUGAUUCAGGCUtg-3′ | (SEQ ID NO: 28) |
| | 3′-GUGUCCCAAAAACGACUAAGUCCGAAC-5′ | (SEQ ID NO: 384) |
| EGFR-1475 Target: | 5′-CACAGGGTTTTTGCTGATTCAGGCTTG-3′ | (SEQ ID NO: 740) |
| | 5′-CAGGAAACAAAAAUUUGUGCUAUgc-3′ | (SEQ ID NO: 29) |
| | 3′-AAGUCCUUUGUUUUUAAACACGAUACG-5′ | (SEQ ID NO: 385) |
| EGFR-1661 Target: | 5′-TTCAGGAAACAAAAATTTGTGCTATGC-3′ | (SEQ ID NO: 741) |
| | 5′-GCUAUGCAAAUACAAUAAACUGGaa-3′ | (SEQ ID NO: 30) |
| | 3′-CACGAUACGUUUAUGUUAUUUGACCUU-5′ | (SEQ ID NO: 386) |
| EGFR-1679 Target: | 5′-GTGCTATGCAAATACAATAAACTGGAA-3′ | (SEQ ID NO: 742) |
| | 5′-GGUCAGAAAACCAAAAUUAUAAGca-3′ | (SEQ ID NO: 31) |
| | 3′-GGCCAGUCUUUUGGUUUUAAUAUUCGU-5′ | (SEQ ID NO: 387) |
| EGFR-1723 Target: | 5′-CCGGTCAGAAAACCAAAATTATAAGCA-3′ | (SEQ ID NO: 743) |
| | 5′-GCGUCUCUUGCCGGAAUGUCAGCcg-3′ | (SEQ ID NO: 32) |
| | 3′-GACGCAGAGAACGGCCUUACAGUCGGC-5′ | (SEQ ID NO: 388) |
| EGFR-1838 Target: | 5′-CTGCGTCTCTTGCCGGAATGTCAGCCG-3′ | (SEQ ID NO: 744) |
| | 5′-GCCCUCCUCUUGCUGCUGGUGGUgg-3′ | (SEQ ID NO: 33) |
| | 3′-CCCGGGAGGAGAACGACGACCACCACC-5′ | (SEQ ID NO: 389) |
| EGFR-2227 Target: | 5′-GGGCCCTCCTCTTGCTGCTGGTGGTGG-3′ | (SEQ ID NO: 745) |
| | 5′-CCCUCCUCUUGCUGCUGGUGGUGgc-3′ | (SEQ ID NO: 34) |
| | 3′-CCGGGAGGAGAACGACGACCACCACCG-5′ | (SEQ ID NO: 390) |
| EGFR-2228 Target: | 5′-GGCCCTCCTCTTGCTGCTGGTGGTGGC-3′ | (SEQ ID NO: 746) |
| | 5′-CCUCUUGCUGCUGGUGGUGGCCCtg-3′ | (SEQ ID NO: 35) |
| | 3′-GAGGAGAACGACGACCACCACCGGGAC-5′ | (SEQ ID NO: 391) |
| EGFR-2232 Target: | 5′-CTCCTCTTGCTGCTGGTGGTGGCCCTG-3′ | (SEQ ID NO: 747) |
| | 5′-CUCUUGCUGCUGGUGGUGGCCCUgg-3′ | (SEQ ID NO: 36) |
| | 3′-AGGAGAACGACGACCACCACCGGGACC-5′ | (SEQ ID NO: 392) |
| EGFR-2233 Target: | 5′-TCCTCTTGCTGCTGGTGGTGGCCCTGG-3′ | (SEQ ID NO: 748) |
| | 5′-GAAGCGCACGCUGCGGAGGCUGCtg-3′ | (SEQ ID NO: 37) |
| | 3′-GCCUUCGCGUGCGACGCCUCCGACGAC-5′ | (SEQ ID NO: 393) |
| EGFR-2295 Target: | 5′-CGGAAGCGCACGCTGCGGAGGCTGCTG-3′ | (SEQ ID NO: 749) |
| | 5′-GCGCACGCUGCGGAGGCUGCUGCag-3′ | (SEQ ID NO: 38) |
| | 3′-UUCGCGUGCGACGCCUCCGACGACGUC-5′ | (SEQ ID NO: 394) |
| EGFR-2298 Target: | 5′-AAGCGCACGCTGCGGAGGCTGCTGCAG-3′ | (SEQ ID NO: 750) |
| | 5′-CUGAAUUCAAAAAGAUCAAAGUGct-3′ | (SEQ ID NO: 39) |
| | 3′-UUGACUUAAGUUUUUCUAGUUUCACGA-5′ | (SEQ ID NO: 395) |
| EGFR-2399 Target: | 5′-AACTGAATTCAAAAAGATCAAAGTGCT-3′ | (SEQ ID NO: 751) |
| | 5′-AAGUGCUGGGCUCCGGUGCGUUCgg-3′ | (SEQ ID NO: 40) |
| | 3′-GUUUCACGACCCGAGGCCACGCAAGCC-5′ | (SEQ ID NO: 396) |
| EGFR-2417 Target: | 5′-CAAAGTGCTGGGCTCCGGTGCGTTCGG-3′ | (SEQ ID NO: 752) |
| | 5′-GUGCUGGGCUCCGGUGCGUUCGGca-3′ | (SEQ ID NO: 41) |
| | 3′-UUCACGACCCGAGGCCACGCAAGCCGU-5′ | (SEQ ID NO: 397) |
| EGFR-2419 Target: | 5′-AAGTGCTGGGCTCCGGTGCGTTCGGCA-3′ | (SEQ ID NO: 753) |
| | 5′-UGCUGGGCUCCGGUGCGUUCGGCac-3′ | (SEQ ID NO: 42) |
| | 3′-UCACGACCCGAGGCCACGCAAGCCGUG-5′ | (SEQ ID NO: 398) |
| EGFR-2420 Target: | 5′-AGTGCTGGGCTCCGGTGCGTTCGGCAC-3′ | (SEQ ID NO: 754) |
| | 5′-GCUGGGCUCCGGUGCGUUCGGCAcg-3′ | (SEQ ID NO: 43) |
| | 3′-CACGACCCGAGGCCACGCAAGCCGUGC-5′ | (SEQ ID NO: 399) |
| EGFR-2421 Target: | 5′-GTGCTGGGCTCCGGTGCGTTCGGCACG-3′ | (SEQ ID NO: 755) |
| | 5′-CUGGGCUCCGGUGCGUUCGGCACgg-3′ | (SEQ ID NO: 44) |
| | 3′-ACGACCCGAGGCCACGCAAGCCGUGCC-5′ | (SEQ ID NO: 400) |
| EGFR-2422 Target: | 5′-TGCTGGGCTCCGGTGCGTTCGGCACGG-3′ | (SEQ ID NO: 756) |
| | 5′-UGUGCCGCCUGCUGGGCAUCUGCct-3′ | (SEQ ID NO: 45) |
| | 3′-GCACACGGCGGACGACCCGUAGACGGA-5′ | (SEQ ID NO: 401) |
| EGFR-2591 Target: | 5′-CGTGTGCCGCCTGCTGGGCATCTGCCT-3′ | (SEQ ID NO: 757) |
| | 5′-GUGCCGCCUGCUGGGCAUCUGCCtc-3′ | (SEQ ID NO: 46) |
| | 3′-CACACGGCGGACGACCCGUAGACGGAG-5′ | (SEQ ID NO: 402) |
| EGFR-2592 Target: | 5′-GTGTGCCGCCTGCTGGGCATCTGCCTC-3′ | (SEQ ID NO: 758) |
| | 5′-GCCGCCUGCUGGGCAUCUGCCUCac-3′ | (SEQ ID NO: 47) |
| | 3′-CACGGCGGACGACCCGUAGACGGAGUG-5′ | (SEQ ID NO: 403) |
| EGFR-2594 Target: | 5′-GTGCCGCCTGCTGGGCATCTGCCTCAC-3′ | (SEQ ID NO: 759) |
| | 5′-CCGUGCAGCUCAUCACGCAGCUCat-3′ | (SEQ ID NO: 48) |
| | 3′-GUGGCACGUCGAGUAGUGCGUCGAGUA-5′ | (SEQ ID NO: 404) |
| EGFR-2624 Target: | 5′-CACCGTGCAGCTCATCACGCAGCTCAT-3′ | (SEQ ID NO: 760) |
| | 5′-UGCAGCUCAUCACGCAGCUCAUGcc-3′ | (SEQ ID NO: 49) |
| | 3′-GCACGUCGAGUAGUGCGUCGAGUACGG-5′ | (SEQ ID NO: 405) |
| EGFR-2627 Target: | 5′-CGTGCAGCTCATCACGCAGCTCATGCC-3′ | (SEQ ID NO: 761) |
| | 5′-GCUCAUCACGCAGCUCAUGCCCUtc-3′ | (SEQ ID NO: 50) |
| | 3′-GUCGAGUAGUGCGUCGAGUACGGGAAG-5′ | (SEQ ID NO: 406) |
| EGFR-2631 Target: | 5′-CAGCTCATCACGCAGCTCATGCCCTTC-3′ | (SEQ ID NO: 762) |
| | 5′-CUCAUCACGCAGCUCAUGCCCUUcg-3′ | (SEQ ID NO: 51) |
| | 3′-UCGAGUAGUGCGUCGAGUACGGGAAGC-5′ | (SEQ ID NO: 407) |
| EGFR-2632 Target: | 5′-AGCTCATCACGCAGCTCATGCCCTTCG-3′ | (SEQ ID NO: 763) |
| | 5′-GCUCAUGCCCUUCGGCUGCCUCCtg-3′ | (SEQ ID NO: 52) |
| | 3′-GUCGAGUACGGGAAGCCGACGGAGGAC-5′ | (SEQ ID NO: 408) |
| EGFR-2643 Target: | 5′-CAGCTCATGCCCTTCGGCTGCCTCCTG-3′ | (SEQ ID NO: 764) |
| | 5′-CUCAUGCCCUUCGGCUGCCUCCUgg-3′ | (SEQ ID NO: 53) |
| | 3′-UCGAGUACGGGAAGCCGACGGAGGACC-5′ | (SEQ ID NO: 409) |
| EGFR-2644 Target: | 5′-AGCTCATGCCCTTCGGCTGCCTCCTGG-3′ | (SEQ ID NO: 765) |
| | 5′-GGAGGACCGUCGCUUGGUGCACCgc-3′ | (SEQ ID NO: 54) |
| | 3′-AACCUCCUGGCAGCGAACCACGUGGCG-5′ | (SEQ ID NO: 410) |
| EGFR-2754 Target: | 5′-TTGGAGGACCGTCGCTTGGTGCACCGC-3′ | (SEQ ID NO: 766) |
| | 5′-AGGACCGUCGCUUGGUGCACCGCga-3′ | (SEQ ID NO: 55) |
| | 3′-CCUCCUGGCAGCGAACCACGUGGCGCU-5′ | (SEQ ID NO: 411) |
| EGFR-2756 Target: | 5′-GGAGGACCGTCGCTTGGTGCACCGCGA-3′ | (SEQ ID NO: 767) |
| | 5′-GGACCGUCGCUUGGUGCACCGCGac-3′ | (SEQ ID NO: 56) |
| | 3′-CUCCUGGCAGCGAACCACGUGGCGCUG-5′ | (SEQ ID NO: 412) |
| EGFR-2757 Target: | 5′-GAGGACCGTCGCTTGGTGCACCGCGAC-3′ | (SEQ ID NO: 768) |
| | 5′-GACCGUCGCUUGGUGCACCGCGAcc-3′ | (SEQ ID NO: 57) |
| | 3′-UCCUGGCAGCGAACCACGUGGCGCUGG-5′ | (SEQ ID NO: 413) |
| EGFR-2758 Target: | 5′-AGGACCGTCGCTTGGTGCACCGCGACC-3′ | (SEQ ID NO: 769) |
| | 5′-CCGUCGCUUGGUGCACCGCGACCtg-3′ | (SEQ ID NO: 58) |
| | 3′-CUGGCAGCGAACCACGUGGCGCUGGAC-5′ | (SEQ ID NO: 414) |
| EGFR-2760 Target: | 5′-GACCGTCGCTTGGTGCACCGCGACCTG-3′ | (SEQ ID NO: 770) |
| | 5′-GUCGCUUGGUGCACCGCGACCUGgc-3′ | (SEQ ID NO: 59) |
| | 3′-GGCAGCGAACCACGUGGCGCUGGACCG-5′ | (SEQ ID NO: 415) |
| EGFR-2762 Target: | 5′-CCGTCGCTTGGTGCACCGCGACCTGGC-3′ | (SEQ ID NO: 771) |
| | 5′-CGCUUGGUGCACCGCGACCUGGCag-3′ | (SEQ ID NO: 60) |
| | 3′-CAGCGAACCACGUGGCGCUGGACCGUC-5′ | (SEQ ID NO: 416) |
| EGFR-2764 Target: | 5′-GTCGCTTGGTGCACCGCGACCTGGCAG-3′ | (SEQ ID NO: 772) |
| | 5′-GCUUGGUGCACCGCGACCUGGCAgc-3′ | (SEQ ID NO: 61) |
| | 3′-AGCGAACCACGUGGCGCUGGACCGUCG-5′ | (SEQ ID NO: 417) |
| EGFR-2765 Target: | 5′-TCGCTTGGTGCACCGCGACCTGGCAGC-3′ | (SEQ ID NO: 773) |
| | 5′-UUGGUGCACCGCGACCUGGCAGCca-3′ | (SEQ ID NO: 62) |
| | 3′-CGAACCACGUGGCGCUGGACCGUCGGU-5′ | (SEQ ID NO: 418) |
| EGFR-2767 Target: | 5′-GCTTGGTGCACCGCGACCTGGCAGCCA-3′ | (SEQ ID NO: 774) |
| | 5′-CAUUGGAAUCAAUUUUACACAGAat-3′ | (SEQ ID NO: 63) |
| | 3′-CCGUAACCUUAGUUAAAAUGUGUCUUA-5′ | (SEQ ID NO: 419) |
| EGFR-2915 Target: | 5′-GGCATTGGAATCAATTTTACACAGAAT-3′ | (SEQ ID NO: 775) |
| | 5′-AAGUGCUGGAUGAUAGACGCAGAta-3′ | (SEQ ID NO: 64) |
| | 3′-AGUUCACGACCUACUAUCUGCGUCUAU-5′ | (SEQ ID NO: 420) |
| EGFR-3115 Target: | 5′-TCAAGTGCTGGATGATAGACGCAGATA-3′ | (SEQ ID NO: 776) |
| | 5′-GUGCUGGAUGAUAGACGCAGAUAgt-3′ | (SEQ ID NO: 65) |
| | 3′-UUCACGACCUACUAUCUGCGUCUAUCA-5′ | (SEQ ID NO: 421) |
| EGFR-3117 Target: | 5′-AAGTGCTGGATGATAGACGCAGATAGT-3′ | (SEQ ID NO: 777) |
| | 5′-UGCUGGAUGAUAGACGCAGAUAGtc-3′ | (SEQ ID NO: 66) |
| | 3′-UCACGACCUACUAUCUGCGUCUAUCAG-5′ | (SEQ ID NO: 422) |
| EGFR-3118 Target: | 5′-AGTGCTGGATGATAGACGCAGATAGTC-3′ | (SEQ ID NO: 778) |
| | 5′-CUGGAUGAUAGACGCAGAUAGUCgc-3′ | (SEQ ID NO: 67) |
| | 3′-ACGACCUACUAUCUGCGUCUAUCAGCG-5′ | (SEQ ID NO: 423) |
| EGFR-3120 Target: | 5′-TGCTGGATGATAGACGCAGATAGTCGC-3′ | (SEQ ID NO: 779) |
| | 5′-CCUGAGCUCUCUGAGUGCAACCAgc-3′ | (SEQ ID NO: 68) |
| | 3′-GAGGACUCGAGAGACUCACGUUGGUCG-5′ | (SEQ ID NO: 424) |
| EGFR-3372 Target: | 5′-CTCCTGAGCTCTCTGAGTGCAACCAGC-3′ | (SEQ ID NO: 780) |
| | 5′-GAGCUCUCUGAGUGCAACCAGCAac-3′ | (SEQ ID NO: 69) |
| | 3′-GACUCGAGAGACUCACGUUGGUCGUUG-5′ | (SEQ ID NO: 425) |
| EGFR-3375 Target: | 5′-CTGAGCTCTCTGAGTGCAACCAGCAAC-3′ | (SEQ ID NO: 781) |
| | 5′-GCUGUCCCAUCAAGGAAGACAGCtt-3′ | (SEQ ID NO: 70) |
| | 3′-UUCGACAGGGUAGUUCCUUCUGUCGAA-5′ | (SEQ ID NO: 426) |
| EGFR-3440 Target: | 5′-AAGCTGTCCCATCAAGGAAGACAGCTT-3′ | (SEQ ID NO: 782) |
| | 5′-CUGUCCCAUCAAGGAAGACAGCUtc-3′ | (SEQ ID NO: 71) |
| | 3′-UCGACAGGGUAGUUCCUUCUGUCGAAG-5′ | (SEQ ID NO: 427) |
| EGFR-3441 Target: | 5′-AGCTGTCCCATCAAGGAAGACAGCTTC-3′ | (SEQ ID NO: 783) |
| | 5′-GACAGCUUCUUGCAGCGAUACAGct-3′ | (SEQ ID NO: 72) |
| | 3′-UUCUGUCGAAGAACGUCGCUAUGUCGA-5′ | (SEQ ID NO: 428) |
| EGFR-3457 Target: | 5′-AAGACAGCTTCTTGCAGCGATACAGCT-3′ | (SEQ ID NO: 784) |
| | 5′-ACAGCUUCUUGCAGCGAUACAGCtc-3′ | (SEQ ID NO: 73) |
| | 3′-UCUGUCGAAGAACGUCGCUAUGUCGAG-5′ | (SEQ ID NO: 429) |
| EGFR-3458 Target: | 5′-AGACAGCTTCTTGCAGCGATACAGCTC-3′ | (SEQ ID NO: 785) |
| | 5′-CAGCUUCUUGCAGCGAUACAGCUca-3′ | (SEQ ID NO: 74) |
| | 3′-CUGUCGAAGAACGUCGCUAUGUCGAGU-5′ | (SEQ ID NO: 430) |
| EGFR-3459 Target: | 5′-GACAGCTTCTTGCAGCGATACAGCTCA-3′ | (SEQ ID NO: 786) |
| | 5′-AGCUUCUUGCAGCGAUACAGCUCag-3′ | (SEQ ID NO: 75) |
| | 3′-UGUCGAAGAACGUCGCUAUGUCGAGUC-5′ | (SEQ ID NO: 431) |
| EGFR-3460 Target: | 5′-ACAGCTTCTTGCAGCGATACAGCTCAG-3′ | (SEQ ID NO: 787) |
| | 5′-GCUUCUUGCAGCGAUACAGCUCAga-3′ | (SEQ ID NO: 76) |
| | 3′-GUCGAAGAACGUCGCUAUGUCGAGUCU-5′ | (SEQ ID NO: 432) |
| EGFR-3461 Target: | 5′-CAGCTTCTTGCAGCGATACAGCTCAGA-3′ | (SEQ ID NO: 788) |
| | 5′-UUCUUGCAGCGAUACAGCUCAGAcc-3′ | (SEQ ID NO: 77) |
| | 3′-CGAAGAACGUCGCUAUGUCGAGUCUGG-5′ | (SEQ ID NO: 433) |
| EGFR-3463 Target: | 5′-GCTTCTTGCAGCGATACAGCTCAGACC-3′ | (SEQ ID NO: 789) |
| | 5′-ACAAAGCAGUGAAUUUAUUGGAGca-3′ | (SEQ ID NO: 78) |
| | 3′-GGUGUUUCGUCACUUAAAUAACCUCGU-5′ | (SEQ ID NO: 434) |
| EGFR-3876 Target: | 5′-CCACAAAGCAGTGAATTTATTGGAGCA-3′ | (SEQ ID NO: 790) |
| | 5′-AUAUUUGAAAAAAAAAAAAAGUAta-3′ | (SEQ ID NO: 79) |
| | 3′-CAUAUAAACUUUUUUUUUUUUUCAUAU-5′ | (SEQ ID NO: 435) |
| EGFR-4178 Target: | 5′-GTATATTTGAAAAAAAAAAAAAGTATA-3′ | (SEQ ID NO: 791) |
| | 5′-UGAGGAUUUUUAUUGAUUGGGGAtc-3′ | (SEQ ID NO: 80) |
| | 3′-ACACUCCUAAAAAUAACUAACCCCUAG-5′ | (SEQ ID NO: 436) |
| EGFR-4205 Target: | 5′-TGTGAGGATTTTTATTGATTGGGGATC-3′ | (SEQ ID NO: 792) |
| | 5′-CUAUUGAUUUUUACUUCAAUGGGct-3′ | (SEQ ID NO: 81) |
| | 3′-GCGAUAACUAAAAAUGAAGUUACCCGA-5′ | (SEQ ID NO: 437) |
| EGFR-4249 Target: | 5′-CGCTATTGATTTTTACTTCAATGGGCT-3′ | (SEQ ID NO: 793) |
| | 5′-GGAAGAAGCUUGCUGGUAGCACUtg-3′ | (SEQ ID NO: 82) |
| | 3′-UUCCUUCUUCGAACGACCAUCGUGAAC-5′ | (SEQ ID NO: 438) |
| EGFR-4284 Target: | 5′-AAGGAAGAAGCTTGCTGGTAGCACTTG-3′ | (SEQ ID NO: 794) |
| | 5′-GAAGAAGCUUGCUGGUAGCACUUgc-3′ | (SEQ ID NO: 83) |
| | 3′-UCCUUCUUCGAACGACCAUCGUGAACG-5′ | (SEQ ID NO: 439) |
| EGFR-4285 Target: | 5′-AGGAAGAAGCTTGCTGGTAGCACTTGC-3′ | (SEQ ID NO: 795) |
| | 5′-AAGAAGCUUGCUGGUAGCACUUGct-3′ | (SEQ ID NO: 84) |
| | 3′-CCUUCUUCGAACGACCAUCGUGAACGA-5′ | (SEQ ID NO: 440) |
| EGFR-4286 Target: | 5′-GGAAGAAGCTTGCTGGTAGCACTTGCT-3′ | (SEQ ID NO: 796) |
| | 5′-AGAAGCUUGCUGGUAGCACUUGCta-3′ | (SEQ ID NO: 85) |
| | 3′-CUUCUUCGAACGACCAUCGUGAACGAU-5′ | (SEQ ID NO: 441) |
| EGFR-4287 Target: | 5′-GAAGAAGCTTGCTGGTAGCACTTGCTA-3′ | (SEQ ID NO: 797) |
| | 5′-GAAGCUUGCUGGUAGCACUUGCUac-3′ | (SEQ ID NO: 86) |
| | 3′-UUCUUCGAACGACCAUCGUGAACGAUG-5′ | (SEQ ID NO: 442) |
| EGFR-4288 Target: | 5′-AAGAAGCTTGCTGGTAGCACTTGCTAC-3′ | (SEQ ID NO: 798) |
| | 5′-AGCUUGCUGGUAGCACUUGCUACcc-3′ | (SEQ ID NO: 87) |
| | 3′-CUUCGAACGACCAUCGUGAACGAUGGG-5′ | (SEQ ID NO: 443) |
| EGFR-4290 Target: | 5′-GAAGCTTGCTGGTAGCACTTGCTACCC-3′ | (SEQ ID NO: 799) |
| | 5′-GCUUGCUGGUAGCACUUGCUACCct-3′ | (SEQ ID NO: 88) |
| | 3′-UUCGAACGACCAUCGUGAACGAUGGGA-5′ | (SEQ ID NO: 444) |
| EGFR-4291 Target: | 5′-AAGCTTGCTGGTAGCACTTGCTACCCT-3′ | (SEQ ID NO: 800) |
| | 5′-CUUGCUGGUAGCACUUGCUACCCtg-3′ | (SEQ ID NO: 89) |
| | 3′-UCGAACGACCAUCGUGAACGAUGGGAC-5′ | (SEQ ID NO: 445) |
| EGFR-4292 Target: | 5′-AGCTTGCTGGTAGCACTTGCTACCCTG-3′ | (SEQ ID NO: 801) |
| | 5′-UUGCUGGUAGCACUUGCUACCCUga-3′ | (SEQ ID NO: 90) |
| | 3′-CGAACGACCAUCGUGAACGAUGGGACU-5′ | (SEQ ID NO: 446) |
| EGFR-4293 Target: | 5′-GCTTGCTGGTAGCACTTGCTACCCTGA-3′ | (SEQ ID NO: 802) |
| | 5′-UGCUGGUAGCACUUGCUACCCUGag-3′ | (SEQ ID NO: 91) |
| | 3′-GAACGACCAUCGUGAACGAUGGGACUC-5′ | (SEQ ID NO: 447) |
| EGFR-4294 Target: | 5′-CTTGCTGGTAGCACTTGCTACCCTGAG-3′ | (SEQ ID NO: 803) |
| | 5′-GCUGGUAGCACUUGCUACCCUGAgt-3′ | (SEQ ID NO: 92) |
| | 3′-AACGACCAUCGUGAACGAUGGGACUCA-5′ | (SEQ ID NO: 448) |
| EGFR-4295 Target: | 5′-TTGCTGGTAGCACTTGCTACCCTGAGT-3′ | (SEQ ID NO: 804) |
| | 5′-AUGCUUGAUUCCAGUGGUUCUGCtt-3′ | (SEQ ID NO: 93) |
| | 3′-CCUACGAACUAAGGUCACCAAGACGAA-5′ | (SEQ ID NO: 449) |
| EGFR-4372 Target: | 5′-GGATGCTTGATTCCAGTGGTTCTGCTT-3′ | (SEQ ID NO: 805) |
| | 5′-UGCUUGAUUCCAGUGGUUCUGCUtc-3′ | (SEQ ID NO: 94) |
| | 3′-CUACGAACUAAGGUCACCAAGACGAAG-5′ | (SEQ ID NO: 450) |
| EGFR-4373 Target: | 5′-GATGCTTGATTCCAGTGGTTCTGCTTC-3′ | (SEQ ID NO: 806) |
| | 5′-CAGGCCGGAUCGGUACUGUAUCAag-3′ | (SEQ ID NO: 95) |
| | 3′-UCGUCCGGCCUAGCCAUGACAUAGUUC-5′ | (SEQ ID NO: 451) |
| EGFR-4450 Target: | 5′-AGCAGGCCGGATCGGTACTGTATCAAG-3′ | (SEQ ID NO: 807) |
| | 5′-CGGAUCGGUACUGUAUCAAGUCAtg-3′ | (SEQ ID NO: 96) |
| | 3′-CGGCCUAGCCAUGACAUAGUUCAGUAC-5′ | (SEQ ID NO: 452) |
| EGFR-4455 Target: | 5′-GCCGGATCGGTACTGTATCAAGTCATG-3′ | (SEQ ID NO: 808) |
| | 5′-CUUAGACUUACUUUUGUAAAAAUgt-3′ | (SEQ ID NO: 97) |
| | 3′-AGGAAUCUGAAUGAAAACAUUUUUACA-5′ | (SEQ ID NO: 453) |
| EGFR-4550 Target: | 5′-TCCTTAGACTTACTTTTGTAAAAATGT-3′ | (SEQ ID NO: 809) |
| | 5′-GUCUUGCUGUCAUGAAAUCAGCAag-3′ | (SEQ ID NO: 98) |
| | 3′-GACAGAACGACAGUACUUUAGUCGUUC-5′ | (SEQ ID NO: 454) |
| EGFR-4684 Target: | 5′-CTGTCTTGCTGTCATGAAATCAGCAAG-3′ | (SEQ ID NO: 810) |
| | 5′-UAAGGAUAGCACCGCUUUUGUUCtc-3′ | (SEQ ID NO: 99) |
| | 3′-GGAUUCCUAUCGUGGCGAAAACAAGAG-5′ | (SEQ ID NO: 455) |
| EGFR-4804 Target: | 5′-CCTAAGGATAGCACCGCTTTTGTTCTC-3′ | (SEQ ID NO: 811) |
| | 5′-AGGAUAGCACCGCUUUUGUUCUCgc-3′ | (SEQ ID NO: 100) |
| | 3′-AUUCCUAUCGUGGCGAAAACAAGAGCG-5′ | (SEQ ID NO: 456) |
| EGFR-4806 Target: | 5′-TAAGGATAGCACCGCTTTTGTTCTCGC-3′ | (SEQ ID NO: 812) |
| | 5′-GGAUAGCACCGCUUUUGUUCUCGca-3′ | (SEQ ID NO: 101) |
| | 3′-UUCCUAUCGUGGCGAAAACAAGAGCGU-5′ | (SEQ ID NO: 457) |
| EGFR-4807 Target: | 5′-AAGGATAGCACCGCTTTTGTTCTCGCA-3′ | (SEQ ID NO: 813) |
| | 5′-GAUAGCACCGCUUUUGUUCUCGCaa-3′ | (SEQ ID NO: 102) |
| | 3′-UCCUAUCGUGGCGAAAACAAGAGCGUU-5′ | (SEQ ID NO: 458) |
| EGFR-4808 Target: | 5′-AGGATAGCACCGCTTTTGTTCTCGCAA-3′ | (SEQ ID NO: 814) |
| | 5′-AUAGCACCGCUUUUGUUCUCGCAaa-3′ | (SEQ ID NO: 103) |
| | 3′-CCUAUCGUGGCGAAAACAAGAGCGUUU-5′ | (SEQ ID NO: 459) |
| EGFR-4809 Target: | 5′-GGATAGCACCGCTTTTGTTCTCGCAAA-3′ | (SEQ ID NO: 815) |
| | 5′-UAGCACCGCUUUUGUUCUCGCAAaa-3′ | (SEQ ID NO: 104) |
| | 3′-CUAUCGUGGCGAAAACAAGAGCGUUUU-5′ | (SEQ ID NO: 460) |
| EGFR-4810 Target: | 5′-GATAGCACCGCTTTTGTTCTCGCAAAA-3′ | (SEQ ID NO: 816) |
| | 5′-AGCACCGCUUUUGUUCUCGCAAAaa-3′ | (SEQ ID NO: 105) |
| | 3′-UAUCGUGGCGAAAACAAGAGCGUUUUU-5′ | (SEQ ID NO: 461) |
| EGFR-4811 Target: | 5′-ATAGCACCGCTTTTGTTCTCGCAAAAA-3′ | (SEQ ID NO: 817) |
| | 5′-GCACCGCUUUUGUUCUCGCAAAAac-3′ | (SEQ ID NO: 106) |
| | 3′-AUCGUGGCGAAAACAAGAGCGUUUUUG-5′ | (SEQ ID NO: 462) |
| EGFR-4812 Target: | 5′-TAGCACCGCTTTTGTTCTCGCAAAAAC-3′ | (SEQ ID NO: 818) |
| | 5′-CACCGCUUUUGUUCUCGCAAAAAcg-3′ | (SEQ ID NO: 107) |
| | 3′-UCGUGGCGAAAACAAGAGCGUUUUUGC-5′ | (SEQ ID NO: 463) |
| EGFR-4813 Target: | 5′-AGCACCGCTTTTGTTCTCGCAAAAACG-3′ | (SEQ ID NO: 819) |
| | 5′-CGCUUUUGUUCUCGCAAAAACGUat-3′ | (SEQ ID NO: 108) |
| | 3′-UGGCGAAAACAAGAGCGUUUUUGCAUA-5′ | (SEQ ID NO: 464) |
| EGFR-4816 Target: | 5′-ACCGCTTTTGTTCTCGCAAAAACGTAT-3′ | (SEQ ID NO: 820) |
| | 5′-GCUUUUGUUCUCGCAAAAACGUAtc-3′ | (SEQ ID NO: 109) |
| | 3′-GGCGAAAACAAGAGCGUUUUUGCAUAG-5′ | (SEQ ID NO: 465) |
| EGFR-4817 Target: | 5′-CCGCTTTTGTTCTCGCAAAAACGTATC-3′ | (SEQ ID NO: 821) |
| | 5′-CUUUUGUUCUCGCAAAAACGUAUct-3′ | (SEQ ID NO: 110) |
| | 3′-GCGAAAACAAGAGCGUUUUUGCAUAGA-5′ | (SEQ ID NO: 466) |
| EGFR-4818 Target: | 5′-CGCTTTTGTTCTCGCAAAAACGTATCT-3′ | (SEQ ID NO: 822) |
| | 5′-UUUUGUUCUCGCAAAAACGUAUCtc-3′ | (SEQ ID NO: 111) |
| | 3′-CGAAAACAAGAGCGUUUUUGCAUAGAG-5′ | (SEQ ID NO: 467) |
| EGFR-4819 Target: | 5′-GCTTTTGTTCTCGCAAAAACGTATCTC-3′ | (SEQ ID NO: 823) |
| | 5′-UUCUCGCAAAAACGUAUCUCCUAat-3′ | (SEQ ID NO: 112) |
| | 3′-ACAAGAGCGUUUUUGCAUAGAGGAUUA-5′ | (SEQ ID NO: 468) |
| EGFR-4824 Target: | 5′-TGTTCTCGCAAAAACGTATCTCCTAAT-3′ | (SEQ ID NO: 824) |
| | 5′-AAAUUAGUUUGUGUUACUUAUGGaa-3′ | (SEQ ID NO: 113) |
| | 3′-GUUUUAAUCAAACACAAUGAAUACCUU-5′ | (SEQ ID NO: 469) |
| EGFR-4953 Target: | 5′-CAAAATTAGTTTGTGTTACTTATGGAA-3′ | (SEQ ID NO: 825) |
| | 5′-UUAUGGAAGAUAGUUUUCUCCUUtt-3′ | (SEQ ID NO: 114) |
| | 3′-UGAAUACCUUCUAUCAAAAGAGGAAAA-5′ | (SEQ ID NO: 470) |
| EGFR-4970 Target: | 5′-ACTTATGGAAGATAGTTTTCTCCTTTT-3′ | (SEQ ID NO: 826) |
| | 5′-UCAAAAGCUUUUUACUCAAAGAGta-3′ | (SEQ ID NO: 115) |
| | 3′-GAAGUUUUCGAAAAAUGAGUUUCUCAU-5′ | (SEQ ID NO: 471) |
| EGFR-5003 Target: | 5′-CTTCAAAAGCTTTTTACTCAAAGAGTA-3′ | (SEQ ID NO: 827) |
| | 5′-ACUAGGGUUUGAAAUUGAUAAUGct-3′ | (SEQ ID NO: 116) |
| | 3′-UUUGAUCCCAAACUUUAACUAUUACGA-5′ | (SEQ ID NO: 472) |
| EGFR-5206 Target: | 5′-AAACTAGGGTTTGAAATTGATAATGCT-3′ | (SEQ ID NO: 828) |
| | 5′-UAAAAUAAUUUCUCUACAAUUGGaa-3′ | (SEQ ID NO: 117) |
| | 3′-GGAUUUUAUUAAAGAGAUGUUAACCUU-5′ | (SEQ ID NO: 473) |
| EGFR-5275 Target: | 5′-CCTAAAATAATTTCTCTACAATTGGAA-3′ | (SEQ ID NO: 829) |
| | 5′-CAGCAGUCCUUUGUAAACAGUGUtt-3′ | (SEQ ID NO: 118) |
| | 3′-UUGUCGUCAGGAAACAUUUGUCACAAA-5′ | (SEQ ID NO: 474) |
| EGFR-5374 Target: | 5′-AACAGCAGTCCTTTGTAAACAGTGTTT-3′ | (SEQ ID NO: 830) |
| | 5′-CAAUUUAUCAAGGAAGAAAUGGUtc-3′ | (SEQ ID NO: 119) |
| | 3′-AGGUUAAAUAGUUCCUUCUUUACCAAG-5′ | (SEQ ID NO: 475) |
| EGFR-5429 Target: | 5′-TCCAATTTATCAAGGAAGAAATGGTTC-3′ | (SEQ ID NO: 831) |
| | 5′-UACAAAAUGUUCCUUUUGCUUUUaa-3′ | (SEQ ID NO: 120) |
| | 3′-GUAUGUUUUACAAGGAAAACGAAAAUU-5′ | (SEQ ID NO: 476) |
| EGFR-5497 Target: | 5′-CATACAAAATGTTCCTTTTGCTTTTAA-3′ | (SEQ ID NO: 832) |
| | 5′-GUUCCUUUUGCUUUUAAAGUAAUtt-3′ | (SEQ ID NO: 121) |
| | 3′-UACAAGGAAAACGAAAAUUUCAUUAAA-5′ | (SEQ ID NO: 477) |
| EGFR-5505 Target: | 5′-ATGTTCCTTTTGCTTTTAAAGTAATTT-3′ | (SEQ ID NO: 833) |
| | 5′-UUCCUUUUGCUUUUAAAGUAAUUtt-3′ | (SEQ ID NO: 122) |
| | 3′-ACAAGGAAAACGAAAAUUUCAUUAAAA-5′ | (SEQ ID NO: 478) |
| EGFR-5506 Target: | 5′-TGTTCCTTTTGCTTTTAAAGTAATTTT-3′ | (SEQ ID NO: 834) |
| | 5′-UUGCUUUUAAAGUAAUUUUUGACtc-3′ | (SEQ ID NO: 123) |
| | 3′-AAAACGAAAAUUUCAUUAAAAACUGAG-5′ | (SEQ ID NO: 479) |
| EGFR-5512 Target: | 5′-TTTTGCTTTTAAAGTAATTTTTGACTC-3′ | (SEQ ID NO: 835) |
| | 5′-GUUAAGAAAGUAUUUGAUUUUUGtc-3′ | (SEQ ID NO: 124) |
| | 3′-AACAAUUCUUUCAUAAACUAAAAACAG-5′ | (SEQ ID NO: 480) |
| EGFR-5565 Target: | 5′-TTGTTAAGAAAGTATTTGATTTTTGTC-3′ | (SEQ ID NO: 836) |
| | 5′-UUGGAAAUUACCUAUGUGCAGAGga-3′ | (SEQ ID NO: 125) |
| | 3′-UAAACCUUUAAUGGAUACACGUCUCCU-5′ | (SEQ ID NO: 481) |
| EGFR-463 Target: | 5′-ATTTGGAAATTACCTATGTGCAGAGGA-3′ | (SEQ ID NO: 837) |
| | 5′-UGGAAAUUACCUAUGUGCAGAGGaa-3′ | (SEQ ID NO: 126) |
| | 3′-AAACCUUUAAUGGAUACACGUCUCCUU-5′ | (SEQ ID NO: 482) |
| EGFR-464 Target: | 5′-TTTGGAAATTACCTATGTGCAGAGGAA-3′ | (SEQ ID NO: 838) |
| | 5′-CUUUCCUUCUUAAAGACCAUCCAgg-3′ | (SEQ ID NO: 127) |
| | 3′-UAGAAAGGAAGAAUUUCUGGUAGGUCC-5′ | (SEQ ID NO: 483) |
| EGFR-496 Target: | 5′-ATCTTTCCTTCTTAAAGACCATCCAGG-3′ | (SEQ ID NO: 839) |
| | 5′-UUUCCUUCUUAAAGACCAUCCAGga-3′ | (SEQ ID NO: 128) |
| | 3′-AGAAAGGAAGAAUUUCUGGUAGGUCCU-5′ | (SEQ ID NO: 484) |
| EGFR-497 Target: | 5′-TCTTTCCTTCTTAAAGACCATCCAGGA-3′ | (SEQ ID NO: 840) |
| | 5′-UUCCUUCUUAAAGACCAUCCAGGag-3′ | (SEQ ID NO: 129) |
| | 3′-GAAAGGAAGAAUUUCUGGUAGGUCCUC-5′ | (SEQ ID NO: 485) |
| EGFR-498 Target: | 5′-CTTTCCTTCTTAAAGACCATCCAGGAG-3′ | (SEQ ID NO: 841) |
| | 5′-UCCUUCUUAAAGACCAUCCAGGAgg-3′ | (SEQ ID NO: 130) |
| | 3′-AAAGGAAGAAUUUCUGGUAGGUCCUCC-5′ | (SEQ ID NO: 486) |
| EGFR-499 Target: | 5′-TTTCCTTCTTAAAGACCATCCAGGAGG-3′ | (SEQ ID NO: 842) |
| | 5′-CCUUCUUAAAGACCAUCCAGGAGgt-3′ | (SEQ ID NO: 131) |
| | 3′-AAGGAAGAAUUUCUGGUAGGUCCUCCA-5′ | (SEQ ID NO: 487) |
| EGFR-500 Target: | 5′-TTCCTTCTTAAAGACCATCCAGGAGGT-3′ | (SEQ ID NO: 843) |
| | 5′-CUUCUUAAAGACCAUCCAGGAGGtg-3′ | (SEQ ID NO: 132) |
| | 3′-AGGAAGAAUUUCUGGUAGGUCCUCCAC-5′ | (SEQ ID NO: 488) |
| EGFR-501 Target: | 5′-TCCTTCTTAAAGACCATCCAGGAGGTG-3′ | (SEQ ID NO: 844) |
| | 5′-UUCUUAAAGACCAUCCAGGAGGUgg-3′ | (SEQ ID NO: 133) |
| | 3′-GGAAGAAUUUCUGGUAGGUCCUCCACC-5′ | (SEQ ID NO: 489) |
| EGFR-502 Target: | 5′-CCTTCTTAAAGACCATCCAGGAGGTGG-3′ | (SEQ ID NO: 845) |
| | 5′-UCUUAAAGACCAUCCAGGAGGUGgc-3′ | (SEQ ID NO: 134) |
| | 3′-GAAGAAUUUCUGGUAGGUCCUCCACCG-5′ | (SEQ ID NO: 490) |
| EGFR-503 Target: | 5′-CTTCTTAAAGACCATCCAGGAGGTGGC-3′ | (SEQ ID NO: 846) |
| | 5′-CUUAAAGACCAUCCAGGAGGUGGct-3′ | (SEQ ID NO: 135) |
| | 3′-AAGAAUUUCUGGUAGGUCCUCCACCGA-5′ | (SEQ ID NO: 491) |
| EGFR-504 Target: | 5′-TTCTTAAAGACCATCCAGGAGGTGGCT-3′ | (SEQ ID NO: 847) |
| | 5′-UUAAAGACCAUCCAGGAGGUGGCtg-3′ | (SEQ ID NO: 136) |
| | 3′-AGAAUUUCUGGUAGGUCCUCCACCGAC-5′ | (SEQ ID NO: 492) |
| EGFR-505 Target: | 5′-TCTTAAAGACCATCCAGGAGGTGGCTG-3′ | (SEQ ID NO: 848) |
| | 5′-UAAAGACCAUCCAGGAGGUGGCUgg-3′ | (SEQ ID NO: 137) |
| | 3′-GAAUUUCUGGUAGGUCCUCCACCGACC-5′ | (SEQ ID NO: 493) |
| EGFR-506 Target: | 5′-CTTAAAGACCATCCAGGAGGTGGCTGG-3′ | (SEQ ID NO: 849) |
| | 5′-AAAGACCAUCCAGGAGGUGGCUGgt-3′ | (SEQ ID NO: 138) |
| | 3′-AAUUUCUGGUAGGUCCUCCACCGACCA-5′ | (SEQ ID NO: 494) |
| EGFR-507 Target: | 5′-TTAAAGACCATCCAGGAGGTGGCTGGT-3′ | (SEQ ID NO: 850) |
| | 5′-AAGACCAUCCAGGAGGUGGCUGGtt-3′ | (SEQ ID NO: 139) |
| | 3′-AUUUCUGGUAGGUCCUCCACCGACCAA-5′ | (SEQ ID NO: 495) |
| EGFR-508 Target: | 5′-TAAAGACCATCCAGGAGGTGGCTGGTT-3′ | (SEQ ID NO: 851) |
| | 5′-AGACCAUCCAGGAGGUGGCUGGUta-3′ | (SEQ ID NO: 140) |
| | 3′-UUUCUGGUAGGUCCUCCACCGACCAAU-5′ | (SEQ ID NO: 496) |
| EGFR-509 Target: | 5′-AAAGACCATCCAGGAGGTGGCTGGTTA-3′ | (SEQ ID NO: 852) |
| | 5′-UGUGAUCCAAGCUGUCCCAAUGGga-3′ | (SEQ ID NO: 141) |
| | 3′-UCACACUAGGUUCGACAGGGUUACCCU-5′ | (SEQ ID NO: 497) |
| EGFR-838 Target: | 5′-AGTGTGATCCAAGCTGTCCCAATGGGA-3′ | (SEQ ID NO: 853) |
| | 5′-GUGAUCCAAGCUGUCCCAAUGGGag-3′ | (SEQ ID NO: 142) |
| | 3′-CACACUAGGUUCGACAGGGUUACCCUC-5′ | (SEQ ID NO: 498) |
| EGFR-839 Target: | 5′-GTGTGATCCAAGCTGTCCCAATGGGAG-3′ | (SEQ ID NO: 854) |
| | 5′-UGAUCCAAGCUGUCCCAAUGGGAgc-3′ | (SEQ ID NO: 143) |
| | 3′-ACACUAGGUUCGACAGGGUUACCCUCG-5′ | (SEQ ID NO: 499) |
| EGFR-840 Target: | 5′-TGTGATCCAAGCTGTCCCAATGGGAGC-3′ | (SEQ ID NO: 855) |
| | 5′-GAUCCAAGCUGUCCCAAUGGGAGct-3′ | (SEQ ID NO: 144) |
| | 3′-CACUAGGUUCGACAGGGUUACCCUCGA-5′ | (SEQ ID NO: 500) |
| EGFR-841 Target: | 5′-GTGATCCAAGCTGTCCCAATGGGAGCT-3′ | (SEQ ID NO: 856) |
| | 5′-AUCCAAGCUGUCCCAAUGGGAGCtg-3′ | (SEQ ID NO: 145) |
| | 3′-ACUAGGUUCGACAGGGUUACCCUCGAC-5′ | (SEQ ID NO: 501) |
| EGFR-842 Target: | 5′-TGATCCAAGCTGTCCCAATGGGAGCTG-3′ | (SEQ ID NO: 857) |
| | 5′-AGGAGAGGAGAACUGCCAGAAACtg-3′ | (SEQ ID NO: 146) |
| | 3′-CGUCCUCUCCUCUUGACGGUCUUUGAC-5′ | (SEQ ID NO: 502) |
| EGFR-876 Target: | 5′-GCAGGAGAGGAGAACTGCCAGAAACTG-3′ | (SEQ ID NO: 858) |
| | 5′-GGAGAGGAGAACUGCCAGAAACUga-3′ | (SEQ ID NO: 147) |
| | 3′-GUCCUCUCCUCUUGACGGUCUUUGACU-5′ | (SEQ ID NO: 503) |
| EGFR-877 Target: | 5′-CAGGAGAGGAGAACTGCCAGAAACTGA-3′ | (SEQ ID NO: 859) |
| | 5′-GAGAGGAGAACUGCCAGAAACUGac-3′ | (SEQ ID NO: 148) |
| | 3′-UCCUCUCCUCUUGACGGUCUUUGACUG-5′ | (SEQ ID NO: 504) |
| EGFR-878 Target: | 5′-AGGAGAGGAGAACTGCCAGAAACTGAC-3′ | (SEQ ID NO: 860) |
| | 5′-AGAGGAGAACUGCCAGAAACUGAcc-3′ | (SEQ ID NO: 149) |
| | 3′-CCUCUCCUCUUGACGGUCUUUGACUGG-5′ | (SEQ ID NO: 505) |
| EGFR-879 Target: | 5′-GGAGAGGAGAACTGCCAGAAACTGACC-3′ | (SEQ ID NO: 861) |
| | 5′-UGACCAAAAUCAUCUGUGCCCAGca-3′ | (SEQ ID NO: 150) |
| | 3′-UGACUGGUUUUAGUAGACACGGGUCGU-5′ | (SEQ ID NO: 506) |
| EGFR-899 Target: | 5′-ACTGACCAAAATCATCTGTGCCCAGCA-3′ | (SEQ ID NO: 862) |
| | 5′-GACCAAAAUCAUCUGUGCCCAGCag-3′ | (SEQ ID NO: 151) |
| | 3′-GACUGGUUUUAGUAGACACGGGUCGUC-5′ | (SEQ ID NO: 507) |
| EGFR-900 Target: | 5′-CTGACCAAAATCATCTGTGCCCAGCAG-3′ | (SEQ ID NO: 863) |
| | 5′-ACCAAAAUCAUCUGUGCCCAGCAgt-3′ | (SEQ ID NO: 152) |
| | 3′-ACUGGUUUUAGUAGACACGGGUCGUCA-5′ | (SEQ ID NO: 508) |
| EGFR-901 Target: | 5′-TGACCAAAATCATCTGTGCCCAGCAGT-3′ | (SEQ ID NO: 864) |
| | 5′-CCAAAAUCAUCUGUGCCCAGCAGtg-3′ | (SEQ ID NO: 153) |
| | 3′-CUGGUUUUAGUAGACACGGGUCGUCAC-5′ | (SEQ ID NO: 509) |
| EGFR-902 Target: | 5′-GACCAAAATCATCTGTGCCCAGCAGTG-3′ | (SEQ ID NO: 865) |
| | 5′-CAAAAUCAUCUGUGCCCAGCAGUgc-3′ | (SEQ ID NO: 154) |
| | 3′-UGGUUUUAGUAGACACGGGUCGUCACG-5′ | (SEQ ID NO: 510) |
| EGFR-903 Target: | 5′-ACCAAAATCATCTGTGCCCAGCAGTGC-3′ | (SEQ ID NO: 866) |
| | 5′-AAAAUCAUCUGUGCCCAGCAGUGct-3′ | (SEQ ID NO: 155) |
| | 3′-GGUUUUAGUAGACACGGGUCGUCACGA-5′ | (SEQ ID NO: 511) |
| EGFR-904 Target: | 5′-CCAAAATCATCTGTGCCCAGCAGTGCT-3′ | (SEQ ID NO: 867) |
| | 5′-AAAUCAUCUGUGCCCAGCAGUGCtc-3′ | (SEQ ID NO: 156) |
| | 3′-GUUUUAGUAGACACGGGUCGUCACGAG-5′ | (SEQ ID NO: 512) |
| EGFR-905 Target: | 5′-CAAAATCATCTGTGCCCAGCAGTGCTC-3′ | (SEQ ID NO: 868) |
| | 5′-CAGUGACUGCUGCCACAACCAGUgt-3′ | (SEQ ID NO: 157) |
| | 3′-GGGUCACUGACGACGGUGUUGGUCACA-5′ | (SEQ ID NO: 513) |
| EGFR-954 Target: | 5′-CCCAGTGACTGCTGCCACAACCAGTGT-3′ | (SEQ ID NO: 869) |
| | 5′-AGUGACUGCUGCCACAACCAGUGtg-3′ | (SEQ ID NO: 158) |
| | 3′-GGUCACUGACGACGGUGUUGGUCACAC-5′ | (SEQ ID NO: 514) |
| EGFR-955 Target: | 5′-CCAGTGACTGCTGCCACAACCAGTGTG-3′ | (SEQ ID NO: 870) |
| | 5′-GUGACUGCUGCCACAACCAGUGUgc-3′ | (SEQ ID NO: 159) |
| | 3′-GUCACUGACGACGGUGUUGGUCACACG-5′ | (SEQ ID NO: 515) |
| EGFR-956 Target: | 5′-CAGTGACTGCTGCCACAACCAGTGTGC-3′ | (SEQ ID NO: 871) |
| | 5′-CACUCUCCAUAAAUGCUACGAAUat-3′ | (SEQ ID NO: 160) |
| | 3′-GAGUGAGAGGUAUUUACGAUGCUUAUA-5′ | (SEQ ID NO: 516) |
| EGFR-1313 Target: | 5′-CTCACTCTCCATAAATGCTACGAATAT-3′ | (SEQ ID NO: 872) |
| | 5′-UUUUUGCUGAUUCAGGCUUGGCCtg-3′ | (SEQ ID NO: 161) |
| | 3′-CCAAAAACGACUAAGUCCGAACCGGAC-5′ | (SEQ ID NO: 517) |
| EGFR-1480 Target: | 5′-GGTTTTTGCTGATTCAGGCTTGGCCTG-3′ | (SEQ ID NO: 873) |
| | 5′-UUUUGCUGAUUCAGGCUUGGCCUga-3′ | (SEQ ID NO: 162) |
| | 3′-CAAAAACGACUAAGUCCGAACCGGACU-5′ | (SEQ ID NO: 518) |
| EGFR-1481 Target: | 5′-GTTTTTGCTGATTCAGGCTTGGCCTGA-3′ | (SEQ ID NO: 874) |
| | 5′-UUUGCUGAUUCAGGCUUGGCCUGaa-3′ | (SEQ ID NO: 163) |
| | 3′-AAAAACGACUAAGUCCGAACCGGACUU-5′ | (SEQ ID NO: 519) |
| EGFR-1482 Target: | 5′-TTTTTGCTGATTCAGGCTTGGCCTGAA-3′ | (SEQ ID NO: 875) |
| | 5′-UUGCUGAUUCAGGCUUGGCCUGAaa-3′ | (SEQ ID NO: 164) |
| | 3′-AAAACGACUAAGUCCGAACCGGACUUU-5′ | (SEQ ID NO: 520) |
| EGFR-1483 Target: | 5′-TTTTGCTGATTCAGGCTTGGCCTGAAA-3′ | (SEQ ID NO: 876) |
| | 5′-UGCUGAUUCAGGCUUGGCCUGAAaa-3′ | (SEQ ID NO: 165) |
| | 3′-AAACGACUAAGUCCGAACCGGACUUUU-5′ | (SEQ ID NO: 521) |
| EGFR-1484 Target: | 5′-TTTGCTGATTCAGGCTTGGCCTGAAAA-3′ | (SEQ ID NO: 877) |
| | 5′-GCUGAUUCAGGCUUGGCCUGAAAac-3′ | (SEQ ID NO: 166) |
| | 3′-AACGACUAAGUCCGAACCGGACUUUUG-5′ | (SEQ ID NO: 522) |
| EGFR-1485 Target: | 5′-TTGCTGATTCAGGCTTGGCCTGAAAAC-3′ | (SEQ ID NO: 878) |
| | 5′-CUGAUUCAGGCUUGGCCUGAAAAca-3′ | (SEQ ID NO: 167) |
| | 3′-ACGACUAAGUCCGAACCGGACUUUUGU-5′ | (SEQ ID NO: 523) |
| EGFR-1486 Target: | 5′-TGCTGATTCAGGCTTGGCCTGAAAACA-3′ | (SEQ ID NO: 879) |
| | 5′-UGAUUCAGGCUUGGCCUGAAAACag-3′ | (SEQ ID NO: 168) |
| | 3′-CGACUAAGUCCGAACCGGACUUUUGUC-5′ | (SEQ ID NO: 524) |
| EGFR-1487 Target: | 5′-GCTGATTCAGGCTTGGCCTGAAAACAG-3′ | (SEQ ID NO: 880) |
| | 5′-AAGCAACAUGGUCAGUUUUCUCUtg-3′ | (SEQ ID NO: 169) |
| | 3′-GGUUCGUUGUACCAGUCAAAAGAGAAC-5′ | (SEQ ID NO: 525) |
| EGFR-1561 Target: | 5′-CCAAGCAACATGGTCAGTTTTCTCTTG-3′ | (SEQ ID NO: 881) |
| | 5′-AGCAACAUGGUCAGUUUUCUCUUgc-3′ | (SEQ ID NO: 170) |
| | 3′-GUUCGUUGUACCAGUCAAAAGAGAACG-5′ | (SEQ ID NO: 526) |
| EGFR-1562 Target: | 5′-CAAGCAACATGGTCAGTTTTCTCTTGC-3′ | (SEQ ID NO: 882) |
| | 5′-GCAACAUGGUCAGUUUUCUCUUGca-3′ | (SEQ ID NO: 171) |
| | 3′-UUCGUUGUACCAGUCAAAAGAGAACGU-5′ | (SEQ ID NO: 527) |
| EGFR-1563 Target: | 5′-AAGCAACATGGTCAGTTTTCTCTTGCA-3′ | (SEQ ID NO: 883) |
| | 5′-CAAUAAACUGGAAAAAACUGUUUgg-3′ | (SEQ ID NO: 172) |
| | 3′-AUGUUAUUUGACCUUUUUUGACAAACC-5′ | (SEQ ID NO: 528) |
| EGFR-1691 Target: | 5′-TACAATAAACTGGAAAAAACTGTTTGG-3′ | (SEQ ID NO: 884) |
| | 5′-CAGGCCAUGAACAUCACCUGCACag-3′ | (SEQ ID NO: 173) |
| | 3′-GAGUCCGGUACUUGUAGUGGACGUGUC-5′ | (SEQ ID NO: 529) |
| EGFR-1963 Target: | 5′-CTCAGGCCATGAACATCACCTGCACAG-3′ | (SEQ ID NO: 885) |
| | 5′-AGGCCAUGAACAUCACCUGCACAgg-3′ | (SEQ ID NO: 174) |
| | 3′-AGUCCGGUACUUGUAGUGGACGUGUCC-5′ | (SEQ ID NO: 530) |
| EGFR-1964 Target: | 5′-TCAGGCCATGAACATCACCTGCACAGG-3′ | (SEQ ID NO: 886) |
| | 5′-AUCCAGUGUGCCCACUACAUUGAcg-3′ | (SEQ ID NO: 175) |
| | 3′-CAUAGGUCACACGGGUGAUGUAACUGC-5′ | (SEQ ID NO: 531) |
| EGFR-2008 Target: | 5′-GTATCCAGTGTGCCCACTACATTGACG-3′ | (SEQ ID NO: 887) |
| | 5′-UCCAGUGUGCCCACUACAUUGACgg-3′ | (SEQ ID NO: 176) |
| | 3′-AUAGGUCACACGGGUGAUGUAACUGCC-5′ | (SEQ ID NO: 532) |
| EGFR-2009 Target: | 5′-TATCCAGTGTGCCCACTACATTGACGG-3′ | (SEQ ID NO: 888) |
| | 5′-CCAGUGUGCCCACUACAUUGACGgc-3′ | (SEQ ID NO: 177) |
| | 3′-UAGGUCACACGGGUGAUGUAACUGCCG-5′ | (SEQ ID NO: 533) |
| EGFR-2010 Target: | 5′-ATCCAGTGTGCCCACTACATTGACGGC-3′ | (SEQ ID NO: 889) |
| | 5′-CAGUGUGCCCACUACAUUGACGGcc-3′ | (SEQ ID NO: 178) |
| | 3′-AGGUCACACGGGUGAUGUAACUGCCGG-5′ | (SEQ ID NO: 534) |
| EGFR-2011 Target: | 5′-TCCAGTGTGCCCACTACATTGACGGCC-3′ | (SEQ ID NO: 890) |
| | 5′-AGUGUGCCCACUACAUUGACGGCcc-3′ | (SEQ ID NO: 179) |
| | 3′-GGUCACACGGGUGAUGUAACUGCCGGG-5′ | (SEQ ID NO: 535) |
| EGFR-2012 Target: | 5′-CCAGTGTGCCCACTACATTGACGGCCC-3′ | (SEQ ID NO: 891) |
| | 5′-GAAUUCAAAAAGAUCAAAGUGCUgg-3′ | (SEQ ID NO: 180) |
| | 3′-GACUUAAGUUUUUCUAGUUUCACGACC-5′ | (SEQ ID NO: 536) |
| EGFR-2401 Target: | 5′-CTGAATTCAAAAAGATCAAAGTGCTGG-3′ | (SEQ ID NO: 892) |
| | 5′-AAUUCAAAAAGAUCAAAGUGCUGgg-3′ | (SEQ ID NO: 181) |
| | 3′-ACUUAAGUUUUUCUAGUUUCACGACCC-5′ | (SEQ ID NO: 537) |
| EGFR-2402 Target: | 5′-TGAATTCAAAAAGATCAAAGTGCTGGG-3′ | (SEQ ID NO: 893) |
| | 5′-CUCUGGAUCCCAGAAGGUGAGAAag-3′ | (SEQ ID NO: 182) |
| | 3′-CUGAGACCUAGGGUCUUCCACUCUUUC-5′ | (SEQ ID NO: 538) |
| EGFR-2458 Target: | 5′-GACTCTGGATCCCAGAAGGTGAGAAAG-3′ | (SEQ ID NO: 894) |
| | 5′-UCUGGAUCCCAGAAGGUGAGAAAgt-3′ | (SEQ ID NO: 183) |
| | 3′-UGAGACCUAGGGUCUUCCACUCUUUCA-5′ | (SEQ ID NO: 539) |
| EGFR-2459 Target: | 5′-ACTCTGGATCCCAGAAGGTGAGAAAGT-3′ | (SEQ ID NO: 895) |
| | 5′-CUGGAUCCCAGAAGGUGAGAAAGtt-3′ | (SEQ ID NO: 184) |
| | 3′-GAGACCUAGGGUCUUCCACUCUUUCAA-5′ | (SEQ ID NO: 540) |
| EGFR-2460 Target: | 5′-CTCTGGATCCCAGAAGGTGAGAAAGTT-3′ | (SEQ ID NO: 896) |
| | 5′-UGGAUCCCAGAAGGUGAGAAAGUta-3′ | (SEQ ID NO: 185) |
| | 3′-AGACCUAGGGUCUUCCACUCUUUCAAU-5′ | (SEQ ID NO: 541) |
| EGFR-2461 Target: | 5′-TCTGGATCCCAGAAGGTGAGAAAGTTA-3′ | (SEQ ID NO: 897) |
| | 5′-GGAUCCCAGAAGGUGAGAAAGUUaa-3′ | (SEQ ID NO: 186) |
| | 3′-GACCUAGGGUCUUCCACUCUUUCAAUU-5′ | (SEQ ID NO: 542) |
| EGFR-2462 Target: | 5′-CTGGATCCCAGAAGGTGAGAAAGTTAA-3′ | (SEQ ID NO: 898) |
| | 5′-GAUCCCAGAAGGUGAGAAAGUUAaa-3′ | (SEQ ID NO: 187) |
| | 3′-ACCUAGGGUCUUCCACUCUUUCAAUUU-5′ | (SEQ ID NO: 543) |
| EGFR-2463 Target: | 5′-TGGATCCCAGAAGGTGAGAAAGTTAAA-3′ | (SEQ ID NO: 899) |
| | 5′-AUCCCAGAAGGUGAGAAAGUUAAaa-3′ | (SEQ ID NO: 188) |
| | 3′-CCUAGGGUCUUCCACUCUUUCAAUUUU-5′ | (SEQ ID NO: 544) |
| EGFR-2464 Target: | 5′-GGATCCCAGAAGGTGAGAAAGTTAAAA-3′ | (SEQ ID NO: 900) |
| | 5′-UCCCAGAAGGUGAGAAAGUUAAAat-3′ | (SEQ ID NO: 189) |
| | 3′-CUAGGGUCUUCCACUCUUUCAAUUUUA-5′ | (SEQ ID NO: 545) |
| EGFR-2465 Target: | 5′-GATCCCAGAAGGTGAGAAAGTTAAAAT-3′ | (SEQ ID NO: 901) |
| | 5′-CAGCAUGUCAAGAUCACAGAUUUtg-3′ | (SEQ ID NO: 190) |
| | 3′-GCGUCGUACAGUUCUAGUGUCUAAAAC-5′ | (SEQ ID NO: 546) |
| EGFR-2815 Target: | 5′-CGCAGCATGTCAAGATCACAGATTTTG-3′ | (SEQ ID NO: 902) |
| | 5′-AGCAUGUCAAGAUCACAGAUUUUgg-3′ | (SEQ ID NO: 191) |
| | 3′-CGUCGUACAGUUCUAGUGUCUAAAACC-5′ | (SEQ ID NO: 547) |
| EGFR-2816 Target: | 5′-GCAGCATGTCAAGATCACAGATTTTGG-3′ | (SEQ ID NO: 903) |
| | 5′-GCAUGUCAAGAUCACAGAUUUUGgg-3′ | (SEQ ID NO: 192) |
| | 3′-GUCGUACAGUUCUAGUGUCUAAAACCC-5′ | (SEQ ID NO: 548) |
| EGFR-2817 Target: | 5′-CAGCATGTCAAGATCACAGATTTTGGG-3′ | (SEQ ID NO: 904) |
| | 5′-CAUGUCAAGAUCACAGAUUUUGGgc-3′ | (SEQ ID NO: 193) |
| | 3′-UCGUACAGUUCUAGUGUCUAAAACCCG-5′ | (SEQ ID NO: 549) |
| EGFR-2818 Target: | 5′-AGCATGTCAAGATCACAGATTTTGGGC-3′ | (SEQ ID NO: 905) |
| | 5′-AUGUCAAGAUCACAGAUUUUGGGct-3′ | (SEQ ID NO: 194) |
| | 3′-CGUACAGUUCUAGUGUCUAAAACCCGA-5′ | (SEQ ID NO: 550) |
| EGFR-2819 Target: | 5′-GCATGTCAAGATCACAGATTTTGGGCT-3′ | (SEQ ID NO: 906) |
| | 5′-UGUCAAGAUCACAGAUUUUGGGCtg-3′ | (SEQ ID NO: 195) |
| | 3′-GUACAGUUCUAGUGUCUAAAACCCGAC-5′ | (SEQ ID NO: 551) |
| EGFR-2820 Target: | 5′-CATGTCAAGATCACAGATTTTGGGCTG-3′ | (SEQ ID NO: 907) |
| | 5′-GUCAAGAUCACAGAUUUUGGGCUgg-3′ | (SEQ ID NO: 196) |
| | 3′-UACAGUUCUAGUGUCUAAAACCCGACC-5′ | (SEQ ID NO: 552) |
| EGFR-2821 Target: | 5′-ATGTCAAGATCACAGATTTTGGGCTGG-3′ | (SEQ ID NO: 908) |
| | 5′-UCAAGAUCACAGAUUUUGGGCUGgc-3′ | (SEQ ID NO: 197) |
| | 3′-ACAGUUCUAGUGUCUAAAACCCGACCG-5′ | (SEQ ID NO: 553) |
| EGFR-2822 Target: | 5′-TGTCAAGATCACAGATTTTGGGCTGGC-3′ | (SEQ ID NO: 909) |
| | 5′-CAAGAUCACAGAUUUUGGGCUGGcc-3′ | (SEQ ID NO: 198) |
| | 3′-CAGUUCUAGUGUCUAAAACCCGACCGG-5′ | (SEQ ID NO: 554) |
| EGFR-2823 Target: | 5′-GTCAAGATCACAGATTTTGGGCTGGCC-3′ | (SEQ ID NO: 910) |
| | 5′-AAGAUCACAGAUUUUGGGCUGGCca-3′ | (SEQ ID NO: 199) |
| | 3′-AGUUCUAGUGUCUAAAACCCGACCGGU-5′ | (SEQ ID NO: 555) |
| EGFR-2824 Target: | 5′-TCAAGATCACAGATTTTGGGCTGGCCA-3′ | (SEQ ID NO: 911) |
| | 5′-AGAUCACAGAUUUUGGGCUGGCCaa-3′ | (SEQ ID NO: 200) |
| | 3′-GUUCUAGUGUCUAAAACCCGACCGGUU-5′ | (SEQ ID NO: 556) |
| EGFR-2825 Target: | 5′-CAAGATCACAGATTTTGGGCTGGCCAA-3′ | (SEQ ID NO: 912) |
| | 5′-GAUCACAGAUUUUGGGCUGGCCAaa-3′ | (SEQ ID NO: 201) |
| | 3′-UUCUAGUGUCUAAAACCCGACCGGUUU-5′ | (SEQ ID NO: 557) |
| EGFR-2826 Target: | 5′-AAGATCACAGATTTTGGGCTGGCCAAA-3′ | (SEQ ID NO: 913) |
| | 5′-AUCACAGAUUUUGGGCUGGCCAAac-3′ | (SEQ ID NO: 202) |
| | 3′-UCUAGUGUCUAAAACCCGACCGGUUUG-5′ | (SEQ ID NO: 558) |
| EGFR-2827 Target: | 5′-AGATCACAGATTTTGGGCTGGCCAAAC-3′ | (SEQ ID NO: 914) |
| | 5′-UCACAGAUUUUGGGCUGGCCAAAct-3′ | (SEQ ID NO: 203) |
| | 3′-CUAGUGUCUAAAACCCGACCGGUUUGA-5′ | (SEQ ID NO: 559) |
| EGFR-2828 Target: | 5′-GATCACAGATTTTGGGCTGGCCAAACT-3′ | (SEQ ID NO: 915) |
| | 5′-CACAGAUUUUGGGCUGGCCAAACtg-3′ | (SEQ ID NO: 204) |
| | 3′-UAGUGUCUAAAACCCGACCGGUUUGAC-5′ | (SEQ ID NO: 560) |
| EGFR-2829 Target: | 5′-ATCACAGATTTTGGGCTGGCCAAACTG-3′ | (SEQ ID NO: 916) |
| | 5′-ACAGAUUUUGGGCUGGCCAAACUgc-3′ | (SEQ ID NO: 205) |
| | 3′-AGUGUCUAAAACCCGACCGGUUUGACG-5′ | (SEQ ID NO: 561) |
| EGFR-2830 Target: | 5′-TCACAGATTTTGGGCTGGCCAAACTGC-3′ | (SEQ ID NO: 917) |
| | 5′-CAGAUUUUGGGCUGGCCAAACUGct-3′ | (SEQ ID NO: 206) |
| | 3′-GUGUCUAAAACCCGACCGGUUUGACGA-5′ | (SEQ ID NO: 562) |
| EGFR-2831 Target: | 5′-CACAGATTTTGGGCTGGCCAAACTGCT-3′ | (SEQ ID NO: 918) |
| | 5′-AGAUUUUGGGCUGGCCAAACUGCtg-3′ | (SEQ ID NO: 207) |
| | 3′-UGUCUAAAACCCGACCGGUUUGACGAC-5′ | (SEQ ID NO: 563) |
| EGFR-2832 Target: | 5′-ACAGATTTTGGGCTGGCCAAACTGCTG-3′ | (SEQ ID NO: 919) |
| | 5′-GAUUUUGGGCUGGCCAAACUGCUgg-3′ | (SEQ ID NO: 208) |
| | 3′-GUCUAAAACCCGACCGGUUUGACGACC-5′ | (SEQ ID NO: 564) |
| EGFR-2833 Target: | 5′-CAGATTTTGGGCTGGCCAAACTGCTGG-3′ | (SEQ ID NO: 920) |
| | 5′-AUUUUGGGCUGGCCAAACUGCUGgg-3′ | (SEQ ID NO: 209) |
| | 3′-UCUAAAACCCGACCGGUUUGACGACCC-5′ | (SEQ ID NO: 565) |
| EGFR-2834 Target: | 5′-AGATTTTGGGCTGGCCAAACTGCTGGG-3′ | (SEQ ID NO: 921) |
| | 5′-UUUUGGGCUGGCCAAACUGCUGGgt-3′ | (SEQ ID NO: 210) |
| | 3′-CUAAAACCCGACCGGUUUGACGACCCA-5′ | (SEQ ID NO: 566) |
| EGFR-2835 Target: | 5′-GATTTTGGGCTGGCCAAACTGCTGGGT-3′ | (SEQ ID NO: 922) |
| | 5′-UUUGGGCUGGCCAAACUGCUGGGtg-3′ | (SEQ ID NO: 211) |
| | 3′-UAAAACCCGACCGGUUUGACGACCCAC-5′ | (SEQ ID NO: 567) |
| EGFR-2836 Target: | 5′-ATTTTGGGCTGGCCAAACTGCTGGGTG-3′ | (SEQ ID NO: 923) |
| | 5′-UUGGGCUGGCCAAACUGCUGGGUgc-3′ | (SEQ ID NO: 212) |
| | 3′-AAAACCCGACCGGUUUGACGACCCACG-5′ | (SEQ ID NO: 568) |
| EGFR-2837 Target: | 5′-TTTTGGGCTGGCCAAACTGCTGGGTGC-3′ | (SEQ ID NO: 924) |
| | 5′-GCAAAGUGCCUAUCAAGUGGAUGgc-3′ | (SEQ ID NO: 213) |
| | 3′-UCCGUUUCACGGAUAGUUCACCUACCG-5′ | (SEQ ID NO: 569) |
| EGFR-2891 Target: | 5′-AGGCAAAGTGCCTATCAAGTGGATGGC-3′ | (SEQ ID NO: 925) |
| | 5′-CAAAGUGCCUAUCAAGUGGAUGGca-3′ | (SEQ ID NO: 214) |
| | 3′-CCGUUUCACGGAUAGUUCACCUACCGU-5′ | (SEQ ID NO: 570) |
| EGFR-2892 Target: | 5′-GGCAAAGTGCCTATCAAGTGGATGGCA-3′ | (SEQ ID NO: 926) |
| | 5′-AAAGUGCCUAUCAAGUGGAUGGCat-3′ | (SEQ ID NO: 215) |
| | 3′-CGUUUCACGGAUAGUUCACCUACCGUA-5′ | (SEQ ID NO: 571) |
| EGFR-2893 Target: | 5′-GCAAAGTGCCTATCAAGTGGATGGCAT-3′ | (SEQ ID NO: 927) |
| | 5′-AAGUGCCUAUCAAGUGGAUGGCAtt-3′ | (SEQ ID NO: 216) |
| | 3′-GUUUCACGGAUAGUUCACCUACCGUAA-5′ | (SEQ ID NO: 572) |
| EGFR-2894 Target: | 5′-CAAAGTGCCTATCAAGTGGATGGCATT-3′ | (SEQ ID NO: 928) |
| | 5′-AGUGCCUAUCAAGUGGAUGGCAUtg-3′ | (SEQ ID NO: 217) |
| | 3′-UUUCACGGAUAGUUCACCUACCGUAAC-5′ | (SEQ ID NO: 573) |
| EGFR-2895 Target: | 5′-AAAGTGCCTATCAAGTGGATGGCATTG-3′ | (SEQ ID NO: 929) |
| | 5′-GUGCCUAUCAAGUGGAUGGCAUUgg-3′ | (SEQ ID NO: 218) |
| | 3′-UUCACGGAUAGUUCACCUACCGUAACC-5′ | (SEQ ID NO: 574) |
| EGFR-2896 Target: | 5′-AAGTGCCTATCAAGTGGATGGCATTGG-3′ | (SEQ ID NO: 930) |
| | 5′-UGCCUAUCAAGUGGAUGGCAUUGga-3′ | (SEQ ID NO: 219) |
| | 3′-UCACGGAUAGUUCACCUACCGUAACCU-5′ | (SEQ ID NO: 575) |
| EGFR-2897 Target: | 5′-AGTGCCTATCAAGTGGATGGCATTGGA-3′ | (SEQ ID NO: 931) |
| | 5′-ACCAUCGAUGUCUACAUGAUCAUgg-3′ | (SEQ ID NO: 220) |
| | 3′-CAUGGUAGCUACAGAUGUACUAGUACC-5′ | (SEQ ID NO: 576) |
| EGFR-3088 Target: | 5′-GTACCATCGATGTCTACATGATCATGG-3′ | (SEQ ID NO: 932) |
| | 5′-CCAUCGAUGUCUACAUGAUCAUGgt-3′ | (SEQ ID NO: 221) |
| | 3′-AUGGUAGCUACAGAUGUACUAGUACCA-5′ | (SEQ ID NO: 577) |
| EGFR-3089 Target: | 5′-TACCATCGATGTCTACATGATCATGGT-3′ | (SEQ ID NO: 933) |
| | 5′-CAUCGAUGUCUACAUGAUCAUGGtc-3′ | (SEQ ID NO: 222) |
| | 3′-UGGUAGCUACAGAUGUACUAGUACCAG-5′ | (SEQ ID NO: 578) |
| EGFR-3090 Target: | 5′-ACCATCGATGTCTACATGATCATGGTC-3′ | (SEQ ID NO: 934) |
| | 5′-AUCGAUGUCUACAUGAUCAUGGUca-3′ | (SEQ ID NO: 223) |
| | 3′-GGUAGCUACAGAUGUACUAGUACCAGU-5′ | (SEQ ID NO: 579) |
| EGFR-3091 Target: | 5′-CCATCGATGTCTACATGATCATGGTCA-3′ | (SEQ ID NO: 935) |
| | 5′-UCGAUGUCUACAUGAUCAUGGUCaa-3′ | (SEQ ID NO: 224) |
| | 3′-GUAGCUACAGAUGUACUAGUACCAGUU-5′ | (SEQ ID NO: 580) |
| EGFR-3092 Target: | 5′-CATCGATGTCTACATGATCATGGTCAA-3′ | (SEQ ID NO: 936) |
| | 5′-CGAUGUCUACAUGAUCAUGGUCAag-3′ | (SEQ ID NO: 225) |
| | 3′-UAGCUACAGAUGUACUAGUACCAGUUC-5′ | (SEQ ID NO: 581) |
| EGFR-3093 Target: | 5′-ATCGATGTCTACATGATCATGGTCAAG-3′ | (SEQ ID NO: 937) |
| | 5′-GAUGUCUACAUGAUCAUGGUCAAgt-3′ | (SEQ ID NO: 226) |
| | 3′-AGCUACAGAUGUACUAGUACCAGUUCA-5′ | (SEQ ID NO: 582) |
| EGFR-3094 Target: | 5′-TCGATGTCTACATGATCATGGTCAAGT-3′ | (SEQ ID NO: 938) |
| | 5′-AUGUCUACAUGAUCAUGGUCAAGtg-3′ | (SEQ ID NO: 227) |
| | 3′-GCUACAGAUGUACUAGUACCAGUUCAC-5′ | (SEQ ID NO: 583) |
| EGFR-3095 Target: | 5′-CGATGTCTACATGATCATGGTCAAGTG-3′ | (SEQ ID NO: 939) |
| | 5′-UGUCUACAUGAUCAUGGUCAAGUgc-3′ | (SEQ ID NO: 228) |
| | 3′-CUACAGAUGUACUAGUACCAGUUCACG-5′ | (SEQ ID NO: 584) |
| EGFR-3096 Target: | 5′-GATGTCTACATGATCATGGTCAAGTGC-3′ | (SEQ ID NO: 940) |
| | 5′-GUCUACAUGAUCAUGGUCAAGUGct-3′ | (SEQ ID NO: 229) |
| | 3′-UACAGAUGUACUAGUACCAGUUCACGA-5′ | (SEQ ID NO: 585) |
| EGFR-3097 Target: | 5′-ATGTCTACATGATCATGGTCAAGTGCT-3′ | (SEQ ID NO: 941) |
| | 5′-UCUACAUGAUCAUGGUCAAGUGCtg-3′ | (SEQ ID NO: 230) |
| | 3′-ACAGAUGUACUAGUACCAGUUCACGAC-5′ | (SEQ ID NO: 586) |
| EGFR-3098 Target: | 5′-TGTCTACATGATCATGGTCAAGTGCTG-3′ | (SEQ ID NO: 942) |
| | 5′-CUACAUGAUCAUGGUCAAGUGCUgg-3′ | (SEQ ID NO: 231) |
| | 3′-CAGAUGUACUAGUACCAGUUCACGACC-5′ | (SEQ ID NO: 587) |
| EGFR-3099 Target: | 5′-GTCTACATGATCATGGTCAAGTGCTGG-3′ | (SEQ ID NO: 943) |
| | 5′-UACAUGAUCAUGGUCAAGUGCUGga-3′ | (SEQ ID NO: 232) |
| | 3′-AGAUGUACUAGUACCAGUUCACGACCU-5′ | (SEQ ID NO: 588) |
| EGFR-3100 Target: | 5′-TCTACATGATCATGGTCAAGTGCTGGA-3′ | (SEQ ID NO: 944) |
| | 5′-ACAUGAUCAUGGUCAAGUGCUGGat-3′ | (SEQ ID NO: 233) |
| | 3′-GAUGUACUAGUACCAGUUCACGACCUA-5′ | (SEQ ID NO: 589) |
| EGFR-3101 Target: | 5′-CTACATGATCATGGTCAAGTGCTGGAT-3′ | (SEQ ID NO: 945) |
| | 5′-CAUGAUCAUGGUCAAGUGCUGGAtg-3′ | (SEQ ID NO: 234) |
| | 3′-AUGUACUAGUACCAGUUCACGACCUAC-5′ | (SEQ ID NO: 590) |
| EGFR-3102 Target: | 5′-TACATGATCATGGTCAAGTGCTGGATG-3′ | (SEQ ID NO: 946) |
| | 5′-AUGAUCAUGGUCAAGUGCUGGAUga-3′ | (SEQ ID NO: 235) |
| | 3′-UGUACUAGUACCAGUUCACGACCUACU-5′ | (SEQ ID NO: 591) |
| EGFR-3103 Target: | 5′-ACATGATCATGGTCAAGTGCTGGATGA-3′ | (SEQ ID NO: 947) |
| | 5′-UGAUCAUGGUCAAGUGCUGGAUGat-3′ | (SEQ ID NO: 236) |
| | 3′-GUACUAGUACCAGUUCACGACCUACUA-5′ | (SEQ ID NO: 592) |
| EGFR-3104 Target: | 5′-CATGATCATGGTCAAGTGCTGGATGAT-3′ | (SEQ ID NO: 948) |
| | 5′-GAUCAUGGUCAAGUGCUGGAUGAta-3′ | (SEQ ID NO: 237) |
| | 3′-UACUAGUACCAGUUCACGACCUACUAU-5′ | (SEQ ID NO: 593) |
| EGFR-3105 Target: | 5′-ATGATCATGGTCAAGTGCTGGATGATA-3′ | (SEQ ID NO: 949) |
| | 5′-AUCAUGGUCAAGUGCUGGAUGAUag-3′ | (SEQ ID NO: 238) |
| | 3′-ACUAGUACCAGUUCACGACCUACUAUC-5′ | (SEQ ID NO: 594) |
| EGFR-3106 Target: | 5′-TGATCATGGTCAAGTGCTGGATGATAG-3′ | (SEQ ID NO: 950) |
| | 5′-UCAUGGUCAAGUGCUGGAUGAUAga-3′ | (SEQ ID NO: 239) |
| | 3′-CUAGUACCAGUUCACGACCUACUAUCU-5′ | (SEQ ID NO: 595) |
| EGFR-3107 Target: | 5′-GATCATGGTCAAGTGCTGGATGATAGA-3′ | (SEQ ID NO: 951) |
| | 5′-CAUGGUCAAGUGCUGGAUGAUAGac-3′ | (SEQ ID NO: 240) |
| | 3′-UAGUACCAGUUCACGACCUACUAUCUG-5′ | (SEQ ID NO: 596) |
| EGFR-3108 Target: | 5′-ATCATGGTCAAGTGCTGGATGATAGAC-3′ | (SEQ ID NO: 952) |
| | 5′-AUGGUCAAGUGCUGGAUGAUAGAcg-3′ | (SEQ ID NO: 241) |
| | 3′-AGUACCAGUUCACGACCUACUAUCUGC-5′ | (SEQ ID NO: 597) |
| EGFR-3109 Target: | 5′-TCATGGTCAAGTGCTGGATGATAGACG-3′ | (SEQ ID NO: 953) |
| | 5′-UGGUCAAGUGCUGGAUGAUAGACgc-3′ | (SEQ ID NO: 242) |
| | 3′-GUACCAGUUCACGACCUACUAUCUGCG-5′ | (SEQ ID NO: 598) |
| EGFR-3110 Target: | 5′-CATGGTCAAGTGCTGGATGATAGACGC-3′ | (SEQ ID NO: 954) |
| | 5′-GGUCAAGUGCUGGAUGAUAGACGca-3′ | (SEQ ID NO: 243) |
| | 3′-UACCAGUUCACGACCUACUAUCUGCGU-5′ | (SEQ ID NO: 599) |
| EGFR-3111 Target: | 5′-ATGGTCAAGTGCTGGATGATAGACGCA-3′ | (SEQ ID NO: 955) |
| | 5′-GUCAAGUGCUGGAUGAUAGACGCag-3′ | (SEQ ID NO: 244) |
| | 3′-ACCAGUUCACGACCUACUAUCUGCGUC-5′ | (SEQ ID NO: 600) |
| EGFR-3112 Target: | 5′-TGGTCAAGTGCTGGATGATAGACGCAG-3′ | (SEQ ID NO: 956) |
| | 5′-UCAAGUGCUGGAUGAUAGACGCAga-3′ | (SEQ ID NO: 245) |
| | 3′-CCAGUUCACGACCUACUAUCUGCGUCU-5′ | (SEQ ID NO: 601) |
| EGFR-3113 Target: | 5′-GGTCAAGTGCTGGATGATAGACGCAGA-3′ | (SEQ ID NO: 957) |
| | 5′-GAAUUCUCCAAAAUGGCCCGAGAcc-3′ | (SEQ ID NO: 246) |
| | 3′-AGCUUAAGAGGUUUUACCGGGCUCUGG-5′ | (SEQ ID NO: 602) |
| EGFR-3169 Target: | 5′-TCGAATTCTCCAAAATGGCCCGAGACC-3′ | (SEQ ID NO: 958) |
| | 5′-AAUUCUCCAAAAUGGCCCGAGACcc-3′ | (SEQ ID NO: 247) |
| | 3′-GCUUAAGAGGUUUUACCGGGCUCUGGG-5′ | (SEQ ID NO: 603) |
| EGFR-3170 Target: | 5′-CGAATTCTCCAAAATGGCCCGAGACCC-3′ | (SEQ ID NO: 959) |
| | 5′-GAUGAAAGAAUGCAUUUGCCAAGtc-3′ | (SEQ ID NO: 248) |
| | 3′-CCCUACUUUCUUACGUAAACGGUUCAG-5′ | (SEQ ID NO: 604) |
| EGFR-3220 Target: | 5′-GGGATGAAAGAATGCATTTGCCAAGTC-3′ | (SEQ ID NO: 960) |
| | 5′-AUGAAAGAAUGCAUUUGCCAAGUcc-3′ | (SEQ ID NO: 249) |
| | 3′-CCUACUUUCUUACGUAAACGGUUCAGG-5′ | (SEQ ID NO: 605) |
| EGFR-3221 Target: | 5′-GGATGAAAGAATGCATTTGCCAAGTCC-3′ | (SEQ ID NO: 961) |
| | 5′-UGAAAGAAUGCAUUUGCCAAGUCct-3′ | (SEQ ID NO: 250) |
| | 3′-CUACUUUCUUACGUAAACGGUUCAGGA-5′ | (SEQ ID NO: 606) |
| EGFR-3222 Target: | 5′-GATGAAAGAATGCATTTGCCAAGTCCT-3′ | (SEQ ID NO: 962) |
| | 5′-GAAAGAAUGCAUUUGCCAAGUCCta-3′ | (SEQ ID NO: 251) |
| | 3′-UACUUUCUUACGUAAACGGUUCAGGAU-5′ | (SEQ ID NO: 607) |
| EGFR-3223 Target: | 5′-ATGAAAGAATGCATTTGCCAAGTCCTA-3′ | (SEQ ID NO: 963) |
| | 5′-AAAGAAUGCAUUUGCCAAGUCCUac-3′ | (SEQ ID NO: 252) |
| | 3′-ACUUUCUUACGUAAACGGUUCAGGAUG-5′ | (SEQ ID NO: 608) |
| EGFR-3224 Target: | 5′-TGAAAGAATGCATTTGCCAAGTCCTAC-3′ | (SEQ ID NO: 964) |
| | 5′-GACAACCCUGACUACCAGCAGGAct-3′ | (SEQ ID NO: 253) |
| | 3′-ACCUGUUGGGACUGAUGGUCGUCCUGA-5′ | (SEQ ID NO: 609) |
| EGFR-3772 Target: | 5′-TGGACAACCCTGACTACCAGCAGGACT-3′ | (SEQ ID NO: 965) |
| | 5′-ACAACCCUGACUACCAGCAGGACtt-3′ | (SEQ ID NO: 254) |
| | 3′-CCUGUUGGGACUGAUGGUCGUCCUGAA-5′ | (SEQ ID NO: 610) |
| EGFR-3773 Target: | 5′-GGACAACCCTGACTACCAGCAGGACTT-3′ | (SEQ ID NO: 966) |
| | 5′-CAACCCUGACUACCAGCAGGACUtc-3′ | (SEQ ID NO: 255) |
| | 3′-CUGUUGGGACUGAUGGUCGUCCUGAAG-5′ | (SEQ ID NO: 611) |
| EGFR-3774 Target: | 5′-GACAACCCTGACTACCAGCAGGACTTC-3′ | (SEQ ID NO: 967) |
| | 5′-AACCCUGACUACCAGCAGGACUUct-3′ | (SEQ ID NO: 256) |
| | 3′-UGUUGGGACUGAUGGUCGUCCUGAAGA-5′ | (SEQ ID NO: 612) |
| EGFR-3775 Target: | 5′-ACAACCCTGACTACCAGCAGGACTTCT-3′ | (SEQ ID NO: 968) |
| | 5′-ACCCUGACUACCAGCAGGACUUCtt-3′ | (SEQ ID NO: 257) |
| | 3′-GUUGGGACUGAUGGUCGUCCUGAAGAA-5′ | (SEQ ID NO: 613) |
| EGFR-3776 Target: | 5′-CAACCCTGACTACCAGCAGGACTTCTT-3′ | (SEQ ID NO: 969) |
| | 5′-CCCUGACUACCAGCAGGACUUCUtt-3′ | (SEQ ID NO: 258) |
| | 3′-UUGGGACUGAUGGUCGUCCUGAAGAAA-5′ | (SEQ ID NO: 614) |
| EGFR-3777 Target: | 5′-AACCCTGACTACCAGCAGGACTTCTTT-3′ | (SEQ ID NO: 970) |
| | 5′-CCUGACUACCAGCAGGACUUCUUtc-3′ | (SEQ ID NO: 259) |
| | 3′-UGGGACUGAUGGUCGUCCUGAAGAAAG-5′ | (SEQ ID NO: 615) |
| EGFR-3778 Target: | 5′-ACCCTGACTACCAGCAGGACTTCTTTC-3′ | (SEQ ID NO: 971) |
| | 5′-CUGACUACCAGCAGGACUUCUUUcc-3′ | (SEQ ID NO: 260) |
| | 3′-GGGACUGAUGGUCGUCCUGAAGAAAGG-5′ | (SEQ ID NO: 616) |
| EGFR-3779 Target: | 5′-CCCTGACTACCAGCAGGACTTCTTTCC-3′ | (SEQ ID NO: 972) |

TABLE 3
Selected Human Anti-EGFR DsiRNAs, Unmodified Duplexes (Asymmetrics)

| | | |
|---|---|---|
| | 5′-CGCAGCGCGGCCGCAGCAGCCUCCG-3′ | (SEQ ID NO: 1069) |
| | 3′-CCGCGUCGCGCCGGCGUCGUCGGAGGC-5′ | (SEQ ID NO: 357) |
| EGFR-31 Target: | 5′-GGCGCAGCGCGGCCGCAGCAGCCTCCG-3′ | (SEQ ID NO: 713) |
| | 5′-GCAGCGCGGCCGCAGCAGCCUCCGC-3′ | (SEQ ID NO: 1070) |
| | 3′-CGCGUCGCGCCGGCGUCGUCGGAGGCG-5′ | (SEQ ID NO: 358) |
| EGFR-32 Target: | 5′-GCGCAGCGCGGCCGCAGCAGCCTCCGC-3′ | (SEQ ID NO: 714) |
| | 5′-AGCGCGGCCGCAGCAGCCUCCGCCC-3′ | (SEQ ID NO: 1071) |
| | 3′-CGUCGCGCCGGCGUCGUCGGAGGCGGG-5′ | (SEQ ID NO: 359) |
| EGFR-34 Target: | 5′-GCAGCGCGGCCGCAGCAGCCTCCGCCC-3′ | (SEQ ID NO: 715) |
| | 5′-GCGCUCCUGGCGCUGCUGGCUGCGC-3′ | (SEQ ID NO: 1072) |
| | 3′-GUCGCGAGGACCGCGACGACCGACGCG-5′ | (SEQ ID NO: 360) |
| EGFR-298 Target: | 5′-CAGCGCTCCTGGCGCTGCTGGCTGCGC-3′ | (SEQ ID NO: 716) |
| | 5′-GCUCCUGGCGCUGCUGGCUGCGCUC-3′ | (SEQ ID NO: 1073) |
| | 3′-CGCGAGGACCGCGACGACCGACGCGAG-5′ | (SEQ ID NO: 361) |
| EGFR-300 Target: | 5′-GCGCTCCTGGCGCTGCTGGCTGCGCTC-3′ | (SEQ ID NO: 717) |
| | 5′-UCCUGGCGCUGCUGGCUGCGCUCUG-3′ | (SEQ ID NO: 1074) |
| | 3′-CGAGGACCGCGACGACCGACGCGAGAC-5′ | (SEQ ID NO: 362) |
| EGFR-302 Target: | 5′-GCTCCTGGCGCTGCTGGCTGCGCTCTG-3′ | (SEQ ID NO: 718) |
| | 5′-GUUGGGCACUUUUGAAGAUCAUUUU-3′ | (SEQ ID NO: 1075) |
| | 3′-GUCAACCCGUGAAAACUUCUAGUAAAA-5′ | (SEQ ID NO: 363) |
| EGFR-390 Target: | 5′-CAGTTGGGCACTTTTGAAGATCATTTT-3′ | (SEQ ID NO: 719) |
| | 5′-GGAAUUUGGAAAUUACCUAUGUGCA-3′ | (SEQ ID NO: 1076) |
| | 3′-ACCCUUAAACCUUUAAUGGAUACACGU-5′ | (SEQ ID NO: 364) |
| EGFR-458 Target: | 5′-TGGGAATTTGGAAATTACCTATGTGCA-3′ | (SEQ ID NO: 720) |
| | 5′-UUAUGAUCUUUCCUUCUUAAAGACC-3′ | (SEQ ID NO: 1077) |
| | 3′-UUAAUACUAGAAAGGAAGAAUUUCUGG-5′ | (SEQ ID NO: 365) |
| EGFR-489 Target: | 5′-AATTATGATCTTTCCTTCTTAAAGACC-3′ | (SEQ ID NO: 721) |
| | 5′-GGCUGGUUAUGUCCUCAUUGCCCUC-3′ | (SEQ ID NO: 1078) |
| | 3′-CACCGACCAAUACAGGAGUAACGGGAG-5′ | (SEQ ID NO: 366) |
| EGFR-525 Target: | 5′-GTGGCTGGTTATGTCCTCATTGCCCTC-3′ | (SEQ ID NO: 722) |
| | 5′-CCCAUGAGAAAUUUACAGGAAAUCC-3′ | (SEQ ID NO: 1079) |
| | 3′-ACGGGUACUCUUUAAAUGUCCUUUAGG-5′ | (SEQ ID NO: 367) |
| EGFR-676 Target: | 5′-TGCCCATGAGAAATTTACAGGAAATCC-3′ | (SEQ ID NO: 723) |
| | 5′-UGCAUGGCGCCGUGCGGUUCAGCAA-3′ | (SEQ ID NO: 1080) |
| | 3′-GGACGUACCGCGGCACGCCAAGUCGUU-5′ | (SEQ ID NO: 368) |
| EGFR-701 Target: | 5′-CCTGCATGGCGCCGTGCGGTTCAGCAA-3′ | (SEQ ID NO: 724) |
| | 5′-GCGCCGUGCGGUUCAGCAACAACCC-3′ | (SEQ ID NO: 1081) |
| | 3′-ACCGCGGCACGCCAAGUCGUUGUUGGG-5′ | (SEQ ID NO: 369) |
| EGFR-707 Target: | 5′-TGGCGCCGTGCGGTTCAGCAACAACCC-3′ | (SEQ ID NO: 725) |
| | 5′-GCGCCGUGCGGUUCAGCAACAACCC-3′ | (SEQ ID NO: 1082) |
| | 3′-ACCGCGGCACGCCAAGUCGUUGUUGGG-5′ | (SEQ ID NO: 370) |
| EGFR-707 Target: | 5′-TGGCGCCGTGCGGTTCAGCAACAACCC-3′ | (SEQ ID NO: 726) |
| | 5′-GCCGUGCGGUUCAGCAACAACCCUG-3′ | (SEQ ID NO: 1083) |
| | 3′-CGCGGCACGCCAAGUCGUUGUUGGGAC-5′ | (SEQ ID NO: 371) |
| EGFR-709 Target: | 5′-GCGCCGTGCGGTTCAGCAACAACCCTG-3′ | (SEQ ID NO: 727) |
| | 5′-CCGUGCGGUUCAGCAACAACCCUGC-3′ | (SEQ ID NO: 1084) |
| | 3′-GCGGCACGCCAAGUCGUUGUUGGGACG-5′ | (SEQ ID NO: 372) |
| EGFR-710 Target: | 5′-CGCCGTGCGGTTCAGCAACAACCCTGC-3′ | (SEQ ID NO: 728) |
| | 5′-GCUGCCAAAAGUGUGAUCCAAGCUG-3′ | (SEQ ID NO: 1085) |
| | 3′-GUCGACGGUUUUCACACUAGGUUCGAC-5′ | (SEQ ID NO: 373) |
| EGFR-827 Target: | 5′-CAGCTGCCAAAAGTGTGATCCAAGCTG-3′ | (SEQ ID NO: 729) |
| | 5′-CUGUGCCCAGCAGUGCUCCGGGCGC-3′ | (SEQ ID NO: 1086) |
| | 3′-UAGACACGGGUCGUCACGAGGCCCGCG-5′ | (SEQ ID NO: 374) |
| EGFR-912 Target: | 5′-ATCTGTGCCCAGCAGTGCTCCGGGCGC-3′ | (SEQ ID NO: 730) |
| | 5′-GUGCCCAGCAGUGCUCCGGGCGCUG-3′ | (SEQ ID NO: 1087) |
| | 3′-GACACGGGUCGUCACGAGGCCCGCGAC-5′ | (SEQ ID NO: 375) |
| EGFR-914 Target: | 5′-CTGTGCCCAGCAGTGCTCCGGGCGCTG-3′ | (SEQ ID NO: 731) |
| | 5′-GCUCCGGGCGCUGCCGUGGCAAGUC-3′ | (SEQ ID NO: 1088) |
| | 3′-CACGAGGCCCGCGACGGCACCGUUCAG-5′ | (SEQ ID NO: 376) |
| EGFR-926 Target: | 5′-GTGCTCCGGGCGCTGCCGTGGCAAGTC-3′ | (SEQ ID NO: 732) |
| | 5′-GAGCGACUGCCUGGUCUGCCGCAAA-3′ | (SEQ ID NO: 1089) |
| | 3′-CUCUCGCUGACGGACCAGACGGCGUUU-5′ | (SEQ ID NO: 377) |
| EGFR-1005 Target: | 5′-GAGAGCGACTGCCTGGTCTGCCGCAAA-3′ | (SEQ ID NO: 733) |
| | 5′-GCCUGGUCUGCCGCAAAUUCCGAGA-3′ | (SEQ ID NO: 1090) |
| | 3′-GACGGACCAGACGGCGUUUAAGGCUCU-5′ | (SEQ ID NO: 378) |
| EGFR-1013 Target: | 5′-CTGCCTGGTCTGCCGCAAATTCCGAGA-3′ | (SEQ ID NO: 734) |
| | 5′-CAGAUCACGGCUCGUGCGUCCGAGC-3′ | (SEQ ID NO: 1091) |
| | 3′-CUGUCUAGUGCCGAGCACGCAGGCUCG-5′ | (SEQ ID NO: 379) |
| EGFR-1175 Target: | 5′-GACAGATCACGGCTCGTGCGTCCGAGC-3′ | (SEQ ID NO: 735) |
| | 5′-GCAAAGUGUGUAACGGAAUAGGUAU-3′ | (SEQ ID NO: 1092) |
| | 3′-GGCGUUUCACACAUUGCCUUAUCCAUA-5′ | (SEQ ID NO: 380) |
| EGFR-1271 Target: | 5′-CCGCAAAGTGTGTAACGGAATAGGTAT-3′ | (SEQ ID NO: 736) |
| | 5′-GAAUAGGUAUUGGUGAAUUUAAAGA-3′ | (SEQ ID NO: 1093) |
| | 3′-GCCUUAUCCAUAACCACUUAAAUUUCU-5′ | (SEQ ID NO: 381) |
| EGFR-1286 Target: | 5′-CGGAATAGGTATTGGTGAATTTAAAGA-3′ | (SEQ ID NO: 737) |
| | 5′-ACGAAUAUUAAACACUUCAAAAACU-3′ | (SEQ ID NO: 1094) |
| | 3′-GAUGCUUAUAAUUUGUGAAGUUUUUGA-5′ | (SEQ ID NO: 382) |
| EGFR-1330 Target: | 5′-CTACGAATATTAAACACTTCAAAAACT-3′ | (SEQ ID NO: 738) |
| | 5′-ACAGGAACUGGAUAUUCUGAAAACC-3′ | (SEQ ID NO: 1095) |
| | 3′-GGUGUCCUUGACCUAUAAGACUUUUGG-5′ | (SEQ ID NO: 383) |
| EGFR-1437 Target: | 5′-CCACAGGAACTGGATATTCTGAAAACC-3′ | (SEQ ID NO: 739) |
| | 5′-CAGGGUUUUUGCUGAUUCAGGCUUG-3′ | (SEQ ID NO: 1096) |
| | 3′-GUGUCCCAAAAACGACUAAGUCCGAAC-5′ | (SEQ ID NO: 384) |
| EGFR-1475 Target: | 5′-CACAGGGTTTTTGCTGATTCAGGCTTG-3′ | (SEQ ID NO: 740) |
| | 5′-CAGGAAACAAAAAUUUGUGCUAUGC-3′ | (SEQ ID NO: 1097) |
| | 3′-AAGUCCUUUGUUUUUAAACACGAUACG-5′ | (SEQ ID NO: 385) |
| EGFR-1661 Target: | 5′-TTCAGGAAACAAAAATTTGTGCTATGC-3′ | (SEQ ID NO: 741) |
| | 5′-GCUAUGCAAAUACAAUAAACUGGAA-3′ | (SEQ ID NO: 1098) |
| | 3′-CACGAUACGUUUAUGUUAUUUGACCUU-5′ | (SEQ ID NO: 386) |
| EGFR-1679 Target: | 5′-GTGCTATGCAAATACAATAAACTGGAA-3′ | (SEQ ID NO: 742) |
| | 5′-GGUCAGAAAACCAAAAUUAUAAGCA-3′ | (SEQ ID NO: 1099) |
| | 3′-GGCCAGUCUUUUGGUUUUAAUAUUCGU-5′ | (SEQ ID NO: 387) |
| EGFR-1723 Target: | 5′-CCGGTCAGAAAACCAAAATTATAAGCA-3′ | (SEQ ID NO: 743) |
| | 5′-GCGUCUCUUGCCGGAAUGUCAGCCG-3′ | (SEQ ID NO: 1100) |
| | 3′-GACGCAGAGAACGGCCUUACAGUCGGC-5′ | (SEQ ID NO: 388) |
| EGFR-1838 Target: | 5′-CTGCGTCTCTTGCCGGAATGTCAGCCG-3′ | (SEQ ID NO: 744) |
| | 5′-GCCCUCCUCUUGCUGCUGGUGGUGG-3′ | (SEQ ID NO: 1101) |
| | 3′-CCCGGGAGGAGAACGACGACCACCACC-5′ | (SEQ ID NO: 389) |
| EGFR-2227 Target: | 5′-GGGCCCTCCTCTTGCTGCTGGTGGTGG-3′ | (SEQ ID NO: 745) |
| | 5′-CCCUCCUCUUGCUGCUGGUGGUGGC-3′ | (SEQ ID NO: 1102) |
| | 3′-CCGGGAGGAGAACGACGACCACCACCG-5′ | (SEQ ID NO: 390) |
| EGFR-2228 Target: | 5′-GGCCCTCCTCTTGCTGCTGGTGGTGGC-3′ | (SEQ ID NO: 746) |
| | 5′-CCUCUUGCUGCUGGUGGUGGCCCUG-3′ | (SEQ ID NO: 1103) |
| | 3′-GAGGAGAACGACGACCACCACCGGGAC-5′ | (SEQ ID NO: 391) |
| EGFR-2232 Target: | 5′-CTCCTCTTGCTGCTGGTGGTGGCCCTG-3′ | (SEQ ID NO: 747) |
| | 5′-CUCUUGCUGCUGGUGGUGGCCCUGG-3′ | (SEQ ID NO: 1104) |
| | 3′-AGGAGAACGACGACCACCACCGGGACC-5′ | (SEQ ID NO: 392) |
| EGFR-2233 Target: | 5′-TCCTCTTGCTGCTGGTGGTGGCCCTGG-3′ | (SEQ ID NO: 748) |
| | 5′-GAAGCGCACGCUGCGGAGGCUGCUG-3′ | (SEQ ID NO: 1105) |
| | 3′-GCCUUCGCGUGCGACGCCUCCGACGAC-5′ | (SEQ ID NO: 393) |
| EGFR-2295 Target: | 5′-CGGAAGCGCACGCTGCGGAGGCTGCTG-3′ | (SEQ ID NO: 749) |
| | 5′-GCGCACGCUGCGGAGGCUGCUGCAG-3′ | (SEQ ID NO: 1106) |
| | 3′-UUCGCGUGCGACGCCUCCGACGACGUC-5′ | (SEQ ID NO: 394) |
| EGFR-2298 Target: | 5′-AAGCGCACGCTGCGGAGGCTGCTGCAG-3′ | (SEQ ID NO: 750) |
| | 5′-CUGAAUUCAAAAAGAUCAAAGUGCU-3′ | (SEQ ID NO: 1107) |
| | 3′-UUGACUUAAGUUUUUCUAGUUUCACGA-5′ | (SEQ ID NO: 395) |
| EGFR-2399 Target: | 5′-AACTGAATTCAAAAAGATCAAAGTGCT-3′ | (SEQ ID NO: 751) |
| | 5′-AAGUGCUGGGCUCCGGUGCGUUCGG-3′ | (SEQ ID NO: 1108) |
| | 3′-GUUUCACGACCCGAGGCCACGCAAGCC-5′ | (SEQ ID NO: 396) |
| EGFR-2417 Target: | 5′-CAAAGTGCTGGGCTCCGGTGCGTTCGG-3′ | (SEQ ID NO: 752) |
| | 5′-GUGCUGGGCUCCGGUGCGUUCGGCA-3′ | (SEQ ID NO: 1109) |
| | 3′-UUCACGACCCGAGGCCACGCAAGCCGU-5′ | (SEQ ID NO: 397) |
| EGFR-2419 Target: | 5′-AAGTGCTGGGCTCCGGTGCGTTCGGCA-3′ | (SEQ ID NO: 753) |
| | 5′-UGCUGGGCUCCGGUGCGUUCGGCAC-3′ | (SEQ ID NO: 1110) |
| | 3′-UCACGACCCGAGGCCACGCAAGCCGUG-5′ | (SEQ ID NO: 398) |
| EGFR-2420 Target: | 5′-AGTGCTGGGCTCCGGTGCGTTCGGCAC-3′ | (SEQ ID NO: 754) |
| | 5′-GCUGGGCUCCGGUGCGUUCGGCACG-3′ | (SEQ ID NO: 1111) |
| | 3′-CACGACCCGAGGCCACGCAAGCCGUGC-5′ | (SEQ ID NO: 399) |
| EGFR-2421 Target: | 5′-GTGCTGGGCTCCGGTGCGTTCGGCACG-3′ | (SEQ ID NO: 755) |
| | 5′-CUGGGCUCCGGUGCGUUCGGCACGG-3′ | (SEQ ID NO: 1112) |
| | 3′-ACGACCCGAGGCCACGCAAGCCGUGCC-5′ | (SEQ ID NO: 400) |
| EGFR-2422 Target: | 5′-TGCTGGGCTCCGGTGCGTTCGGCACGG-3′ | (SEQ ID NO: 756) |
| | 5′-UGUGCCGCCUGCUGGGCAUCUGCCU-3′ | (SEQ ID NO: 1113) |
| | 3′-GCACACGGCGGACGACCCGUAGACGGA-5′ | (SEQ ID NO: 401) |
| EGFR-2591 Target: | 5′-CGTGTGCCGCCTGCTGGGCATCTGCCT-3′ | (SEQ ID NO: 757) |
| | 5′-GUGCCGCCUGCUGGGCAUCUGCCUC-3′ | (SEQ ID NO: 1114) |
| | 3′-CACACGGCGGACGACCCGUAGACGGAG-5′ | (SEQ ID NO: 402) |
| EGFR-2592 Target: | 5′-GTGTGCCGCCTGCTGGGCATCTGCCTC-3′ | (SEQ ID NO: 758) |
| | 5′-GCCGCCUGCUGGGCAUCUGCCUCAC-3′ | (SEQ ID NO: 1115) |
| | 3′-CACGGCGGACGACCCGUAGACGGAGUG-5′ | (SEQ ID NO: 403) |
| EGFR-2594 Target: | 5′-GTGCCGCCTGCTGGGCATCTGCCTCAC-3′ | (SEQ ID NO: 759) |
| | 5′-CCGUGCAGCUCAUCACGCAGCUCAU-3′ | (SEQ ID NO: 1116) |
| | 3′-GUGGCACGUCGAGUAGUGCGUCGAGUA-5′ | (SEQ ID NO: 404) |
| EGFR-2624 Target: | 5′-CACCGTGCAGCTCATCACGCAGCTCAT-3′ | (SEQ ID NO: 760) |
| | 5′-UGCAGCUCAUCACGCAGCUCAUGCC-3′ | (SEQ ID NO: 1117) |
| | 3′-GCACGUCGAGUAGUGCGUCGAGUACGG-5′ | (SEQ ID NO: 405) |
| EGFR-2627 Target: | 5′-CGTGCAGCTCATCACGCAGCTCATGCC-3′ | (SEQ ID NO: 761) |
| | 5′-GCUCAUCACGCAGCUCAUGCCCUUC-3′ | (SEQ ID NO: 1118) |
| | 3′-GUCGAGUAGUGCGUCGAGUACGGGAAG-5′ | (SEQ ID NO: 406) |
| EGFR-2631 Target: | 5′-CAGCTCATCACGCAGCTCATGCCCTTC-3′ | (SEQ ID NO: 762) |
| | 5′-CUCAUCACGCAGCUCAUGCCCUUCG-3′ | (SEQ ID NO: 1119) |
| | 3′-UCGAGUAGUGCGUCGAGUACGGGAAGC-5′ | (SEQ ID NO: 407) |
| EGFR-2632 Target: | 5′-AGCTCATCACGCAGCTCATGCCCTTCG-3′ | (SEQ ID NO: 763) |
| | 5′-GCUCAUGCCCUUCGGCUGCCUCCUG-3′ | (SEQ ID NO: 1120) |
| | 3′-GUCGAGUACGGGAAGCCGACGGAGGAC-5′ | (SEQ ID NO: 408) |
| EGFR-2643 Target: | 5′-CAGCTCATGCCCTTCGGCTGCCTCCTG-3′ | (SEQ ID NO: 764) |
| | 5′-CUCAUGCCCUUCGGCUGCCUCCUGG-3′ | (SEQ ID NO: 1121) |
| | 3′-UCGAGUACGGGAAGCCGACGGAGGACC-5′ | (SEQ ID NO: 409) |
| EGFR-2644 Target: | 5′-AGCTCATGCCCTTCGGCTGCCTCCTGG-3′ | (SEQ ID NO: 765) |
| | 5′-GGAGGACCGUCGCUUGGUGCACCGC-3′ | (SEQ ID NO: 1122) |
| | 3′-AACCUCCUGGCAGCGAACCACGUGGCG-5′ | (SEQ ID NO: 410) |
| EGFR-2754 Target: | 5′-TTGGAGGACCGTCGCTTGGTGCACCGC-3′ | (SEQ ID NO: 766) |
| | 5′-AGGACCGUCGCUUGGUGCACCGCGA-3′ | (SEQ ID NO: 1123) |
| | 3′-CCUCCUGGCAGCGAACCACGUGGCGCU-5′ | (SEQ ID NO: 411) |
| EGFR-2756 Target: | 5′-GGAGGACCGTCGCTTGGTGCACCGCGA-3′ | (SEQ ID NO: 767) |
| | 5′-GGACCGUCGCUUGGUGCACCGCGAC-3′ | (SEQ ID NO: 1124) |
| | 3′-CUCCUGGCAGCGAACCACGUGGCGCUG-5′ | (SEQ ID NO: 412) |
| EGFR-2757 Target: | 5′-GAGGACCGTCGCTTGGTGCACCGCGAC-3′ | (SEQ ID NO: 768) |
| | 5′-GACCGUCGCUUGGUGCACCGCGACC-3′ | (SEQ ID NO: 1125) |
| | 3′-UCCUGGCAGCGAACCACGUGGCGCUGG-5′ | (SEQ ID NO: 413) |
| EGFR-2758 Target: | 5′-AGGACCGTCGCTTGGTGCACCGCGACC-3′ | (SEQ ID NO: 769) |
| | 5′-CCGUCGCUUGGUGCACCGCGACCUG-3′ | (SEQ ID NO: 1126) |
| | 3′-CUGGCAGCGAACCACGUGGCGCUGGAC-5′ | (SEQ ID NO: 414) |
| EGFR-2760 Target: | 5′-GACCGTCGCTTGGTGCACCGCGACCTG-3′ | (SEQ ID NO: 770) |
| | 5′-GUCGCUUGGUGCACCGCGACCUGGC-3′ | (SEQ ID NO: 1127) |
| | 3′-GGCAGCGAACCACGUGGCGCUGGACCG-5′ | (SEQ ID NO: 415) |
| EGFR-2762 Target: | 5′-CCGTCGCTTGGTGCACCGCGACCTGGC-3′ | (SEQ ID NO: 771) |
| | 5′-CGCUUGGUGCACCGCGACCUGGCAG-3′ | (SEQ ID NO: 1128) |
| | 3′-CAGCGAACCACGUGGCGCUGGACCGUC-5′ | (SEQ ID NO: 416) |
| EGFR-2764 Target: | 5′-GTCGCTTGGTGCACCGCGACCTGGCAG-3′ | (SEQ ID NO: 772) |
| | 5′-GCUUGGUGCACCGCGACCUGGCAGC-3′ | (SEQ ID NO: 1129) |
| | 3′-AGCGAACCACGUGGCGCUGGACCGUCG-5′ | (SEQ ID NO: 417) |
| EGFR-2765 Target: | 5′-TCGCTTGGTGCACCGCGACCTGGCAGC-3′ | (SEQ ID NO: 773) |
| | 5′-UUGGUGCACCGCGACCUGGCAGCCA-3′ | (SEQ ID NO: 1130) |
| | 3′-CGAACCACGUGGCGCUGGACCGUCGGU-5′ | (SEQ ID NO: 418) |
| EGFR-2767 Target: | 5′-GCTTGGTGCACCGCGACCTGGCAGCCA-3′ | (SEQ ID NO: 774) |
| | 5′-CAUUGGAAUCAAUUUUACACAGAAU-3′ | (SEQ ID NO: 1131) |
| | 3′-CCGUAACCUUAGUUAAAAUGUGUCUUA-5′ | (SEQ ID NO: 419) |
| EGFR-2915 Target: | 5′-GGCATTGGAATCAATTTTACACAGAAT-3′ | (SEQ ID NO: 775) |
| | 5′-AAGUGCUGGAUGAUAGACGCAGAUA-3′ | (SEQ ID NO: 1132) |
| | 3′-AGUUCACGACCUACUAUCUGCGUCUAU-5′ | (SEQ ID NO: 420) |
| EGFR-3115 Target: | 5′-TCAAGTGCTGGATGATAGACGCAGATA-3′ | (SEQ ID NO: 776) |
| | 5′-GUGCUGGAUGAUAGACGCAGAUAGU-3′ | (SEQ ID NO: 1133) |
| | 3′-UUCACGACCUACUAUCUGCGUCUAUCA-5′ | (SEQ ID NO: 421) |
| EGFR-3117 Target: | 5′-AAGTGCTGGATGATAGACGCAGATAGT-3′ | (SEQ ID NO: 777) |
| | 5′-UGCUGGAUGAUAGACGCAGAUAGUC-3′ | (SEQ ID NO: 1134) |
| | 3′-UCACGACCUACUAUCUGCGUCUAUCAG-5′ | (SEQ ID NO: 422) |
| EGFR-3118 Target: | 5′-AGTGCTGGATGATAGACGCAGATAGTC-3′ | (SEQ ID NO: 778) |
| | 5′-CUGGAUGAUAGACGCAGAUAGUCGC-3′ | (SEQ ID NO: 1135) |
| | 3′-ACGACCUACUAUCUGCGUCUAUCAGCG-5′ | (SEQ ID NO: 423) |
| EGFR-3120 Target: | 5′-TGCTGGATGATAGACGCAGATAGTCGC-3′ | (SEQ ID NO: 779) |
| | 5′-CCUGAGCUCUCUGAGUGCAACCAGC-3′ | (SEQ ID NO: 1136) |
| | 3′-GAGGACUCGAGAGACUCACGUUGGUCG-5′ | (SEQ ID NO: 424) |
| EGFR-3372 Target: | 5′-CTCCTGAGCTCTCTGAGTGCAACCAGC-3′ | (SEQ ID NO: 780) |
| | 5′-GAGCUCUCUGAGUGCAACCAGCAAC-3′ | (SEQ ID NO: 1137) |
| | 3′-GACUCGAGAGACUCACGUUGGUCGUUG-5′ | (SEQ ID NO: 425) |
| EGFR-3375 Target: | 5′-CTGAGCTCTCTGAGTGCAACCAGCAAC-3′ | (SEQ ID NO: 781) |
| | 5′-GCUGUCCCAUCAAGGAAGACAGCUU-3′ | (SEQ ID NO: 1138) |
| | 3′-UUCGACAGGGUAGUUCCUUCUGUCGAA-5′ | (SEQ ID NO: 426) |
| EGFR-3440 Target: | 5′-AAGCTGTCCCATCAAGGAAGACAGCTT-3′ | (SEQ ID NO: 782) |
| | 5′-CUGUCCCAUCAAGGAAGACAGCUUC-3′ | (SEQ ID NO: 1139) |
| | 3′-UCGACAGGGUAGUUCCUUCUGUCGAAG-5′ | (SEQ ID NO: 427) |
| EGFR-3441 Target: | 5′-AGCTGTCCCATCAAGGAAGACAGCTTC-3′ | (SEQ ID NO: 783) |
| | 5′-GACAGCUUCUUGCAGCGAUACAGCU-3′ | (SEQ ID NO: 1140) |
| | 3′-UUCUGUCGAAGAACGUCGCUAUGUCGA-5′ | (SEQ ID NO: 428) |
| EGFR-3457 Target: | 5′-AAGACAGCTTCTTGCAGCGATACAGCT-3′ | (SEQ ID NO: 784) |
| | 5′-ACAGCUUCUUGCAGCGAUACAGCUC-3′ | (SEQ ID NO: 1141) |
| | 3′-UCUGUCGAAGAACGUCGCUAUGUCGAG-5′ | (SEQ ID NO: 429) |
| EGFR-3458 Target: | 5′-AGACAGCTTCTTGCAGCGATACAGCTC-3′ | (SEQ ID NO: 785) |
| | 5′-CAGCUUCUUGCAGCGAUACAGCUCA-3′ | (SEQ ID NO: 1142) |
| | 3′-CUGUCGAAGAACGUCGCUAUGUCGAGU-5′ | (SEQ ID NO: 430) |
| EGFR-3459 Target: | 5′-GACAGCTTCTTGCAGCGATACAGCTCA-3′ | (SEQ ID NO: 786) |
| | 5′-AGCUUCUUGCAGCGAUACAGCUCAG-3′ | (SEQ ID NO: 1143) |
| | 3′-UGUCGAAGAACGUCGCUAUGUCGAGUC-5′ | (SEQ ID NO: 431) |
| EGFR-3460 Target: | 5′-ACAGCTTCTTGCAGCGATACAGCTCAG-3′ | (SEQ ID NO: 787) |
| | 5′-GCUUCUUGCAGCGAUACAGCUCAGA-3′ | (SEQ ID NO: 1144) |
| | 3′-GUCGAAGAACGUCGCUAUGUCGAGUCU-5′ | (SEQ ID NO: 432) |
| EGFR-3461 Target: | 5′-CAGCTTCTTGCAGCGATACAGCTCAGA-3′ | (SEQ ID NO: 788) |
| | 5′-UUCUUGCAGCGAUACAGCUCAGACC-3′ | (SEQ ID NO: 1145) |
| | 3′-CGAAGAACGUCGCUAUGUCGAGUCUGG-5′ | (SEQ ID NO: 433) |
| EGFR-3463 Target: | 5′-GCTTCTTGCAGCGATACAGCTCAGACC-3′ | (SEQ ID NO: 789) |
| | 5′-ACAAAGCAGUGAAUUUAUUGGAGCA-3′ | (SEQ ID NO: 1146) |
| | 3′-GGUGUUUCGUCACUUAAAUAACCUCGU-5′ | (SEQ ID NO: 434) |
| EGFR-3876 Target: | 5′-CCACAAAGCAGTGAATTTATTGGAGCA-3′ | (SEQ ID NO: 790) |
| | 5′-AUAUUUGAAAAAAAAAAAAAGUAUA-3′ | (SEQ ID NO: 1147) |
| | 3′-CAUAUAAACUUUUUUUUUUUUUCAUAU-5′ | (SEQ ID NO: 435) |
| EGFR-4178 Target: | 5′-GTATATTTGAAAAAAAAAAAAAGTATA-3′ | (SEQ ID NO: 791) |
| | 5′-UGAGGAUUUUUAUUGAUUGGGGAUC-3′ | (SEQ ID NO: 1148) |
| | 3′-ACACUCCUAAAAAUAACUAACCCCUAG-5′ | (SEQ ID NO: 436) |
| EGFR-4205 Target: | 5′-TGTGAGGATTTTTATTGATTGGGGATC-3′ | (SEQ ID NO: 792) |
| | 5′-CUAUUGAUUUUUACUUCAAUGGGCU-3′ | (SEQ ID NO: 1149) |
| | 3′-GCGAUAACUAAAAAUGAAGUUACCCGA-5′ | (SEQ ID NO: 437) |
| EGFR-4249 Target: | 5′-CGCTATTGATTTTTACTTCAATGGGCT-3′ | (SEQ ID NO: 793) |
| | 5′-GGAAGAAGCUUGCUGGUAGCACUUG-3′ | (SEQ ID NO: 1150) |
| | 3′-UUCCUUCUUCGAACGACCAUCGUGAAC-5′ | (SEQ ID NO: 438) |
| EGFR-4284 Target: | 5′-AAGGAAGAAGCTTGCTGGTAGCACTTG-3′ | (SEQ ID NO: 794) |
| | 5′-GAAGAAGCUUGCUGGUAGCACUUGC-3′ | (SEQ ID NO: 1151) |
| | 3′-UCCUUCUUCGAACGACCAUCGUGAACG-5′ | (SEQ ID NO: 439) |
| EGFR-4285 Target: | 5′-AGGAAGAAGCTTGCTGGTAGCACTTGC-3′ | (SEQ ID NO: 795) |
| | 5′-AAGAAGCUUGCUGGUAGCACUUGCU-3′ | (SEQ ID NO: 1152) |
| | 3′-CCUUCUUCGAACGACCAUCGUGAACGA-5′ | (SEQ ID NO: 440) |
| EGFR-4286 Target: | 5′-GGAAGAAGCTTGCTGGTAGCACTTGCT-3′ | (SEQ ID NO: 796) |
| | 5′-AGAAGCUUGCUGGUAGCACUUGCUA-3′ | (SEQ ID NO: 1153) |
| | 3′-CUUCUUCGAACGACCAUCGUGAACGAU-5′ | (SEQ ID NO: 441) |
| EGFR-4287 Target: | 5′-GAAGAAGCTTGCTGGTAGCACTTGCTA-3′ | (SEQ ID NO: 797) |
| | 5′-GAAGCUUGCUGGUAGCACUUGCUAC-3′ | (SEQ ID NO: 1154) |
| | 3′-UUCUUCGAACGACCAUCGUGAACGAUG-5′ | (SEQ ID NO: 442) |
| EGFR-4288 Target: | 5′-AAGAAGCTTGCTGGTAGCACTTGCTAC-3′ | (SEQ ID NO: 798) |
| | 5′-AGCUUGCUGGUAGCACUUGCUACCC-3′ | (SEQ ID NO: 1155) |
| | 3′-CUUCGAACGACCAUCGUGAACGAUGGG-5′ | (SEQ ID NO: 443) |
| EGFR-4290 Target: | 5′-GAAGCTTGCTGGTAGCACTTGCTACCC-3′ | (SEQ ID NO: 799) |
| | 5′-GCUUGCUGGUAGCACUUGCUACCCU-3′ | (SEQ ID NO: 1156) |
| | 3′-UUCGAACGACCAUCGUGAACGAUGGGA-5′ | (SEQ ID NO: 444) |
| EGFR-4291 Target: | 5′-AAGCTTGCTGGTAGCACTTGCTACCCT-3′ | (SEQ ID NO: 800) |
| | 5′-CUUGCUGGUAGCACUUGCUACCCUG-3′ | (SEQ ID NO: 1157) |
| | 3′-UCGAACGACCAUCGUGAACGAUGGGAC-5′ | (SEQ ID NO: 445) |
| EGFR-4292 Target: | 5′-AGCTTGCTGGTAGCACTTGCTACCCTG-3′ | (SEQ ID NO: 801) |
| | 5′-UUGCUGGUAGCACUUGCUACCCUGA-3′ | (SEQ ID NO: 1158) |
| | 3′-CGAACGACCAUCGUGAACGAUGGGACU-5′ | (SEQ ID NO: 446) |
| EGFR-4293 Target: | 5′-GCTTGCTGGTAGCACTTGCTACCCTGA-3′ | (SEQ ID NO: 802) |
| | 5′-UGCUGGUAGCACUUGCUACCCUGAG-3′ | (SEQ ID NO: 1159) |
| | 3′-GAACGACCAUCGUGAACGAUGGGACUC-5′ | (SEQ ID NO: 447) |
| EGFR-4294 Target: | 5′-CTTGCTGGTAGCACTTGCTACCCTGAG-3′ | (SEQ ID NO: 803) |
| | 5′-GCUGGUAGCACUUGCUACCCUGAGU-3′ | (SEQ ID NO: 1160) |
| | 3′-AACGACCAUCGUGAACGAUGGGACUCA-5′ | (SEQ ID NO: 448) |
| EGFR-4295 Target: | 5′-TTGCTGGTAGCACTTGCTACCCTGAGT-3′ | (SEQ ID NO: 804) |
| | 5′-AUGCUUGAUUCCAGUGGUUCUGCUU-3′ | (SEQ ID NO: 1161) |
| | 3′-CCUACGAACUAAGGUCACCAAGACGAA-5′ | (SEQ ID NO: 449) |
| EGFR-4372 Target: | 5′-GGATGCTTGATTCCAGTGGTTCTGCTT-3′ | (SEQ ID NO: 805) |
| | 5′-UGCUUGAUUCCAGUGGUUCUGCUUC-3′ | (SEQ ID NO: 1162) |
| | 3′-CUACGAACUAAGGUCACCAAGACGAAG-5′ | (SEQ ID NO: 450) |
| EGFR-4373 Target: | 5′-GATGCTTGATTCCAGTGGTTCTGCTTC-3′ | (SEQ ID NO: 806) |
| | 5′-CAGGCCGGAUCGGUACUGUAUCAAG-3′ | (SEQ ID NO: 1163) |
| | 3′-UCGUCCGGCCUAGCCAUGACAUAGUUC-5′ | (SEQ ID NO: 451) |
| EGFR-4450 Target: | 5′-AGCAGGCCGGATCGGTACTGTATCAAG-3′ | (SEQ ID NO: 807) |
| | 5′-CGGAUCGGUACUGUAUCAAGUCAUG-3′ | (SEQ ID NO: 1164) |
| | 3′-CGGCCUAGCCAUGACAUAGUUCAGUAC-5′ | (SEQ ID NO: 452) |
| EGFR-4455 Target: | 5′-GCCGGATCGGTACTGTATCAAGTCATG-3′ | (SEQ ID NO: 808) |
| | 5′-CUUAGACUUACUUUUGUAAAAAUGU-3′ | (SEQ ID NO: 1165) |
| | 3′-AGGAAUCUGAAUGAAAACAUUUUUACA-5′ | (SEQ ID NO: 453) |
| EGFR-4550 Target: | 5′-TCCTTAGACTTACTTTTGTAAAAATGT-3′ | (SEQ ID NO: 809) |
| | 5′-GUCUUGCUGUCAUGAAAUCAGCAAG-3′ | (SEQ ID NO: 1166) |
| | 3′-GACAGAACGACAGUACUUUAGUCGUUC-5′ | (SEQ ID NO: 454) |
| EGFR-4684 Target: | 5′-CTGTCTTGCTGTCATGAAATCAGCAAG-3′ | (SEQ ID NO: 810) |
| | 5′-UAAGGAUAGCACCGCUUUUGUUCUC-3′ | (SEQ ID NO: 1167) |
| | 3′-GGAUUCCUAUCGUGGCGAAAACAAGAG-5′ | (SEQ ID NO: 455) |
| EGFR-4804 Target: | 5′-CCTAAGGATAGCACCGCTTTTGTTCTC-3′ | (SEQ ID NO: 811) |
| | 5′-AGGAUAGCACCGCUUUUGUUCUCGC-3′ | (SEQ ID NO: 1168) |
| | 3′-AUUCCUAUCGUGGCGAAAACAAGAGCG-5′ | (SEQ ID NO: 456) |
| EGFR-4806 Target: | 5′-TAAGGATAGCACCGCTTTTGTTCTCGC-3′ | (SEQ ID NO: 812) |
| | 5′-GGAUAGCACCGCUUUUGUUCUCGCA-3′ | (SEQ ID NO: 1169) |
| | 3′-UUCCUAUCGUGGCGAAAACAAGAGCGU-5′ | (SEQ ID NO: 457) |
| EGFR-4807 Target: | 5′-AAGGATAGCACCGCTTTTGTTCTCGCA-3′ | (SEQ ID NO: 813) |
| | 5′-GAUAGCACCGCUUUUGUUCUCGCAA-3′ | (SEQ ID NO: 1170) |
| | 3′-UCCUAUCGUGGCGAAAACAAGAGCGUU-5′ | (SEQ ID NO: 458) |
| EGFR-4808 Target: | 5′-AGGATAGCACCGCTTTTGTTCTCGCAA-3′ | (SEQ ID NO: 814) |
| | 5′-AUAGCACCGCUUUUGUUCUCGCAAA-3′ | (SEQ ID NO: 1171) |
| | 3′-CCUAUCGUGGCGAAAACAAGAGCGUUU-5′ | (SEQ ID NO: 459) |
| EGFR-4809 Target: | 5′-GGATAGCACCGCTTTTGTTCTCGCAAA-3′ | (SEQ ID NO: 815) |
| | 5′-UAGCACCGCUUUUGUUCUCGCAAAA-3′ | (SEQ ID NO: 1172) |
| | 3′-CUAUCGUGGCGAAAACAAGAGCGUUUU-5′ | (SEQ ID NO: 460) |
| EGFR-4810 Target: | 5′-GATAGCACCGCTTTTGTTCTCGCAAAA-3′ | (SEQ ID NO: 816) |
| | 5′-AGCACCGCUUUUGUUCUCGCAAAAA-3′ | (SEQ ID NO: 1173) |
| | 3′-UAUCGUGGCGAAAACAAGAGCGUUUUU-5′ | (SEQ ID NO: 461) |
| EGFR-4811 Target: | 5′-ATAGCACCGCTTTTGTTCTCGCAAAAA-3′ | (SEQ ID NO: 817) |
| | 5′-GCACCGCUUUUGUUCUCGCAAAAAC-3′ | (SEQ ID NO: 1174) |
| | 3′-AUCGUGGCGAAAACAAGAGCGUUUUUG-5′ | (SEQ ID NO: 462) |
| EGFR-4812 Target: | 5′-TAGCACCGCTTTTGTTCTCGCAAAAAC-3′ | (SEQ ID NO: 818) |
| | 5′-CACCGCUUUUGUUCUCGCAAAAACG-3′ | (SEQ ID NO: 1175) |
| | 3′-UCGUGGCGAAAACAAGAGCGUUUUUGC-5′ | (SEQ ID NO: 463) |
| EGFR-4813 Target: | 5′-AGCACCGCTTTTGTTCTCGCAAAAACG-3′ | (SEQ ID NO: 819) |
| | 5′-CGCUUUUGUUCUCGCAAAAACGUAU-3′ | (SEQ ID NO: 1176) |
| | 3′-UGGCGAAAACAAGAGCGUUUUUGCAUA-5′ | (SEQ ID NO: 464) |
| EGFR-4816 Target: | 5′-ACCGCTTTTGTTCTCGCAAAAACGTAT-3′ | (SEQ ID NO: 820) |
| | 5′-GCUUUUGUUCUCGCAAAAACGUAUC-3′ | (SEQ ID NO: 1177) |
| | 3′-GGCGAAAACAAGAGCGUUUUUGCAUAG-5′ | (SEQ ID NO: 465) |
| EGFR-4817 Target: | 5′-CCGCTTTTGTTCTCGCAAAAACGTATC-3′ | (SEQ ID NO: 821) |
| | 5′-CUUUUGUUCUCGCAAAAACGUAUCU-3′ | (SEQ ID NO: 1178) |
| | 3′-GCGAAAACAAGAGCGUUUUUGCAUAGA-5′ | (SEQ ID NO: 466) |
| EGFR-4818 Target: | 5′-CGCTTTTGTTCTCGCAAAAACGTATCT-3′ | (SEQ ID NO: 822) |
| | 5′-UUUUGUUCUCGCAAAAACGUAUCUC-3′ | (SEQ ID NO: 1179) |
| | 3′-CGAAAACAAGAGCGUUUUUGCAUAGAG-5′ | (SEQ ID NO: 467) |
| EGFR-4819 Target: | 5′-GCTTTTGTTCTCGCAAAAACGTATCTC-3′ | (SEQ ID NO: 823) |
| | 5′-UUCUCGCAAAAACGUAUCUCCUAAU-3′ | (SEQ ID NO: 1180) |
| | 3′-ACAAGAGCGUUUUUGCAUAGAGGAUUA-5′ | (SEQ ID NO: 468) |
| EGFR-4824 Target: | 5′-TGTTCTCGCAAAAACGTATCTCCTAAT-3′ | (SEQ ID NO: 824) |
| | 5′-AAAUUAGUUUGUGUUACUUAUGGAA-3′ | (SEQ ID NO: 1181) |
| | 3′-GUUUUAAUCAAACACAAUGAAUACCUU-5′ | (SEQ ID NO: 469) |
| EGFR-4953 Target: | 5′-CAAAATTAGTTTGTGTTACTTATGGAA-3′ | (SEQ ID NO: 825) |
| | 5′-UUAUGGAAGAUAGUUUUCUCCUUUU-3′ | (SEQ ID NO: 1182) |
| | 3′-UGAAUACCUUCUAUCAAAAGAGGAAAA-5′ | (SEQ ID NO: 470) |
| EGFR-4970 Target: | 5′-ACTTATGGAAGATAGTTTTCTCCTTTT-3′ | (SEQ ID NO: 826) |
| | 5′-UCAAAAGCUUUUUACUCAAAGAGUA-3′ | (SEQ ID NO: 1183) |
| | 3′-GAAGUUUUCGAAAAAUGAGUUUCUCAU-5′ | (SEQ ID NO: 471) |
| EGFR-5003 Target: | 5′-CTTCAAAAGCTTTTTACTCAAAGAGTA-3′ | (SEQ ID NO: 827) |
| | 5′-ACUAGGGUUUGAAAUUGAUAAUGCU-3′ | (SEQ ID NO: 1184) |
| | 3′-UUUGAUCCCAAACUUUAACUAUUACGA-5′ | (SEQ ID NO: 472) |
| EGFR-5206 Target: | 5′-AAACTAGGGTTTGAAATTGATAATGCT-3′ | (SEQ ID NO: 828) |
| | 5′-UAAAAUAAUUUCUCUACAAUUGGAA-3′ | (SEQ ID NO: 1185) |
| | 3′-GGAUUUUAUUAAAGAGAUGUUAACCUU-5′ | (SEQ ID NO: 473) |
| EGFR-5275 Target: | 5′-CCTAAAATAATTTCTCTACAATTGGAA-3′ | (SEQ ID NO: 829) |
| | 5′-CAGCAGUCCUUUGUAAACAGUGUUU-3′ | (SEQ ID NO: 1186) |
| | 3′-UUGUCGUCAGGAAACAUUUGUCACAAA-5′ | (SEQ ID NO: 474) |
| EGFR-5374 Target: | 5′-AACAGCAGTCCTTTGTAAACAGTGTTT-3′ | (SEQ ID NO: 830) |
| | 5′-CAAUUUAUCAAGGAAGAAAUGGUUC-3′ | (SEQ ID NO: 1187) |
| | 3′-AGGUUAAAUAGUUCCUUCUUUACCAAG-5′ | (SEQ ID NO: 475) |
| EGFR-5429 Target: | 5′-TCCAATTTATCAAGGAAGAAATGGTTC-3′ | (SEQ ID NO: 831) |
| | 5′-UACAAAAUGUUCCUUUUGCUUUUAA-3′ | (SEQ ID NO: 1188) |
| | 3′-GUAUGUUUUACAAGGAAAACGAAAAUU-5′ | (SEQ ID NO: 476) |
| EGFR-5497 Target: | 5′-CATACAAAATGTTCCTTTTGCTTTTAA-3′ | (SEQ ID NO: 832) |
| | 5′-GUUCCUUUUGCUUUUAAAGUAAUUU-3′ | (SEQ ID NO: 1189) |
| | 3′-UACAAGGAAAACGAAAAUUUCAUUAAA-5′ | (SEQ ID NO: 477) |
| EGFR-5505 Target: | 5′-ATGTTCCTTTTGCTTTTAAAGTAATTT-3′ | (SEQ ID NO: 833) |
| | 5′-UUCCUUUUGCUUUUAAAGUAAUUUU-3′ | (SEQ ID NO: 1190) |
| | 3′-ACAAGGAAAACGAAAAUUUCAUUAAAA-5′ | (SEQ ID NO: 478) |
| EGFR-5506 Target: | 5′-TGTTCCTTTTGCTTTTAAAGTAATTTT-3′ | (SEQ ID NO: 834) |
| | 5′-UUGCUUUUAAAGUAAUUUUUGACUC-3′ | (SEQ ID NO: 1191) |
| | 3′-AAAACGAAAAUUUCAUUAAAAACUGAG-5′ | (SEQ ID NO: 479) |
| EGFR-5512 Target: | 5′-TTTTGCTTTTAAAGTAATTTTTGACTC-3′ | (SEQ ID NO: 835) |
| | 5′-GUUAAGAAAGUAUUUGAUUUUUGUC-3′ | (SEQ ID NO: 1192) |
| | 3′-AACAAUUCUUUCAUAAACUAAAAACAG-5′ | (SEQ ID NO: 480) |
| EGFR-5565 Target: | 5′-TTGTTAAGAAAGTATTTGATTTTTGTC-3′ | (SEQ ID NO: 836) |
| | 5′-UUGGAAAUUACCUAUGUGCAGAGGA-3′ | (SEQ ID NO: 1193) |
| | 3′-UAAACCUUUAAUGGAUACACGUCUCCU-5′ | (SEQ ID NO: 481) |
| EGFR-463 Target: | 5′-ATTTGGAAATTACCTATGTGCAGAGGA-3′ | (SEQ ID NO: 837) |
| | 5′-UGGAAAUUACCUAUGUGCAGAGGAA-3′ | (SEQ ID NO: 1194) |
| | 3′-AAACCUUUAAUGGAUACACGUCUCCUU-5′ | (SEQ ID NO: 482) |
| EGFR-464 Target: | 5′-TTTGGAAATTACCTATGTGCAGAGGAA-3′ | (SEQ ID NO: 838) |
| | 5′-CUUUCCUUCUUAAAGACCAUCCAGG-3′ | (SEQ ID NO: 1195) |
| | 3′-UAGAAAGGAAGAAUUUCUGGUAGGUCC-5′ | (SEQ ID NO: 483) |
| EGFR-496 Target: | 5′-ATCTTTCCTTCTTAAAGACCATCCAGG-3′ | (SEQ ID NO: 839) |
| | 5′-UUUCCUUCUUAAAGACCAUCCAGGA-3′ | (SEQ ID NO: 1196) |
| | 3′-AGAAAGGAAGAAUUUCUGGUAGGUCCU-5′ | (SEQ ID NO: 484) |
| EGFR-497 Target: | 5′-TCTTTCCTTCTTAAAGACCATCCAGGA-3′ | (SEQ ID NO: 840) |
| | 5′-UUCCUUCUUAAAGACCAUCCAGGAG-3′ | (SEQ ID NO: 1197) |
| | 3′-GAAAGGAAGAAUUUCUGGUAGGUCCUC-5′ | (SEQ ID NO: 485) |
| EGFR-498 Target: | 5′-CTTTCCTTCTTAAAGACCATCCAGGAG-3′ | (SEQ ID NO: 841) |
| | 5′-UCCUUCUUAAAGACCAUCCAGGAGG-3′ | (SEQ ID NO: 1198) |
| | 3′-AAAGGAAGAAUUUCUGGUAGGUCCUCC-5′ | (SEQ ID NO: 486) |
| EGFR-499 Target: | 5′-TTTCCTTCTTAAAGACCATCCAGGAGG-3′ | (SEQ ID NO: 842) |
| | 5′-CCUUCUUAAAGACCAUCCAGGAGGU-3′ | (SEQ ID NO: 1199) |
| | 3′-AAGGAAGAAUUUCUGGUAGGUCCUCCA-5′ | (SEQ ID NO: 487) |
| EGFR-500 Target: | 5′-TTCCTTCTTAAAGACCATCCAGGAGGT-3′ | (SEQ ID NO: 843) |
| | 5′-CUUCUUAAAGACCAUCCAGGAGGUG-3′ | (SEQ ID NO: 1200) |
| | 3′-AGGAAGAAUUUCUGGUAGGUCCUCCAC-5′ | (SEQ ID NO: 488) |
| EGFR-501 Target: | 5′-TCCTTCTTAAAGACCATCCAGGAGGTG-3′ | (SEQ ID NO: 844) |
| | 5′-UUCUUAAAGACCAUCCAGGAGGUGG-3′ | (SEQ ID NO: 1201) |
| | 3′-GGAAGAAUUUCUGGUAGGUCCUCCACC-5′ | (SEQ ID NO: 489) |
| EGFR-502 Target: | 5′-CCTTCTTAAAGACCATCCAGGAGGTGG-3′ | (SEQ ID NO: 845) |
| | 5′-UCUUAAAGACCAUCCAGGAGGUGGC-3′ | (SEQ ID NO: 1202) |
| | 3′-GAAGAAUUUCUGGUAGGUCCUCCACCG-5′ | (SEQ ID NO: 490) |
| EGFR-503 Target: | 5′-CTTCTTAAAGACCATCCAGGAGGTGGC-3′ | (SEQ ID NO: 846) |
| | 5′-CUUAAAGACCAUCCAGGAGGUGGCU-3′ | (SEQ ID NO: 1203) |
| | 3′-AAGAAUUUCUGGUAGGUCCUCCACCGA-5′ | (SEQ ID NO: 491) |
| EGFR-504 Target: | 5′-TTCTTAAAGACCATCCAGGAGGTGGCT-3′ | (SEQ ID NO: 847) |
| | 5′-UUAAAGACCAUCCAGGAGGUGGCUG-3′ | (SEQ ID NO: 1204) |
| | 3′-AGAAUUUCUGGUAGGUCCUCCACCGAC-5′ | (SEQ ID NO: 492) |
| EGFR-505 Target: | 5′-TCTTAAAGACCATCCAGGAGGTGGCTG-3′ | (SEQ ID NO: 848) |
| | 5′-UAAAGACCAUCCAGGAGGUGGCUGG-3′ | (SEQ ID NO: 1205) |
| | 3′-GAAUUUCUGGUAGGUCCUCCACCGACC-5′ | (SEQ ID NO: 493) |
| EGFR-506 Target: | 5′-CTTAAAGACCATCCAGGAGGTGGCTGG-3′ | (SEQ ID NO: 849) |
| | 5′-AAAGACCAUCCAGGAGGUGGCUGGU-3′ | (SEQ ID NO: 1206) |
| | 3′-AAUUUCUGGUAGGUCCUCCACCGACCA-5′ | (SEQ ID NO: 494) |
| EGFR-507 Target: | 5′-TTAAAGACCATCCAGGAGGTGGCTGGT-3′ | (SEQ ID NO: 850) |
| | 5′-AAGACCAUCCAGGAGGUGGCUGGUU-3′ | (SEQ ID NO: 1207) |
| | 3′-AUUUCUGGUAGGUCCUCCACCGACCAA-5′ | (SEQ ID NO: 495) |
| EGFR-508 Target: | 5′-TAAAGACCATCCAGGAGGTGGCTGGTT-3′ | (SEQ ID NO: 851) |
| | 5′-AGACCAUCCAGGAGGUGGCUGGUUA-3′ | (SEQ ID NO: 1208) |
| | 3′-UUUCUGGUAGGUCCUCCACCGACCAAU-5′ | (SEQ ID NO: 496) |
| EGFR-509 Target: | 5′-AAAGACCATCCAGGAGGTGGCTGGTTA-3′ | (SEQ ID NO: 852) |
| | 5′-UGUGAUCCAAGCUGUCCCAAUGGGA-3′ | (SEQ ID NO: 1209) |
| | 3′-UCACACUAGGUUCGACAGGGUUACCCU-5′ | (SEQ ID NO: 497) |
| EGFR-838 Target: | 5′-AGTGTGATCCAAGCTGTCCCAATGGGA-3′ | (SEQ ID NO: 853) |
| | 5′-GUGAUCCAAGCUGUCCCAAUGGGAG-3′ | (SEQ ID NO: 1210) |
| | 3′-CACACUAGGUUCGACAGGGUUACCCUC-5′ | (SEQ ID NO: 498) |
| EGFR-839 Target: | 5′-GTGTGATCCAAGCTGTCCCAATGGGAG-3′ | (SEQ ID NO: 854) |
| | 5′-UGAUCCAAGCUGUCCCAAUGGGAGC-3′ | (SEQ ID NO: 1211) |
| | 3′-ACACUAGGUUCGACAGGGUUACCCUCG-5′ | (SEQ ID NO: 499) |
| EGFR-840 Target: | 5′-TGTGATCCAAGCTGTCCCAATGGGAGC-3′ | (SEQ ID NO: 855) |
| | 5′-GAUCCAAGCUGUCCCAAUGGGAGCU-3′ | (SEQ ID NO: 1212) |
| | 3′-CACUAGGUUCGACAGGGUUACCCUCGA-5′ | (SEQ ID NO: 500) |
| EGFR-841 Target: | 5′-GTGATCCAAGCTGTCCCAATGGGAGCT-3′ | (SEQ ID NO: 856) |
| | 5′-AUCCAAGCUGUCCCAAUGGGAGCUG-3′ | (SEQ ID NO: 1213) |
| | 3′-ACUAGGUUCGACAGGGUUACCCUCGAC-5′ | (SEQ ID NO: 501) |
| EGFR-842 Target: | 5′-TGATCCAAGCTGTCCCAATGGGAGCTG-3′ | (SEQ ID NO: 857) |
| | 5′-AGGAGAGGAGAACUGCCAGAAACUG-3′ | (SEQ ID NO: 1214) |
| | 3′-CGUCCUCUCCUCUUGACGGUCUUUGAC-5′ | (SEQ ID NO: 502) |
| EGFR-876 Target: | 5′-GCAGGAGAGGAGAACTGCCAGAAACTG-3′ | (SEQ ID NO: 858) |
| | 5′-GGAGAGGAGAACUGCCAGAAACUGA-3′ | (SEQ ID NO: 1215) |
| | 3′-GUCCUCUCCUCUUGACGGUCUUUGACU-5′ | (SEQ ID NO: 503) |
| EGFR-877 Target: | 5′-CAGGAGAGGAGAACTGCCAGAAACTGA-3′ | (SEQ ID NO: 859) |
| | 5′-GAGAGGAGAACUGCCAGAAACUGAC-3′ | (SEQ ID NO: 1216) |
| | 3′-UCCUCUCCUCUUGACGGUCUUUGACUG-5′ | (SEQ ID NO: 504) |
| EGFR-878 Target: | 5′-AGGAGAGGAGAACTGCCAGAAACTGAC-3′ | (SEQ ID NO: 860) |
| | 5′-AGAGGAGAACUGCCAGAAACUGACC-3′ | (SEQ ID NO: 1217) |
| | 3′-CCUCUCCUCUUGACGGUCUUUGACUGG-5′ | (SEQ ID NO: 505) |
| EGFR-879 Target: | 5′-GGAGAGGAGAACTGCCAGAAACTGACC-3′ | (SEQ ID NO: 861) |
| | 5′-UGACCAAAAUCAUCUGUGCCCAGCA-3′ | (SEQ ID NO: 1218) |
| | 3′-UGACUGGUUUUAGUAGACACGGGUCGU-5′ | (SEQ ID NO: 506) |
| EGFR-899 Target: | 5′-ACTGACCAAAATCATCTGTGCCCAGCA-3′ | (SEQ ID NO: 862) |
| | 5′-GACCAAAAUCAUCUGUGCCCAGCAG-3′ | (SEQ ID NO: 1219) |
| | 3′-GACUGGUUUUAGUAGACACGGGUCGUC-5′ | (SEQ ID NO: 507) |
| EGFR-900 Target: | 5′-CTGACCAAAATCATCTGTGCCCAGCAG-3′ | (SEQ ID NO: 863) |
| | 5′-ACCAAAAUCAUCUGUGCCCAGCAGU-3′ | (SEQ ID NO: 1220) |
| | 3′-ACUGGUUUUAGUAGACACGGGUCGUCA-5′ | (SEQ ID NO: 508) |
| EGFR-901 Target: | 5′-TGACCAAAATCATCTGTGCCCAGCAGT-3′ | (SEQ ID NO: 864) |
| | 5′-CCAAAAUCAUCUGUGCCCAGCAGUG-3′ | (SEQ ID NO: 1221) |
| | 3′-CUGGUUUUAGUAGACACGGGUCGUCAC-5′ | (SEQ ID NO: 509) |
| EGFR-902 Target: | 5′-GACCAAAATCATCTGTGCCCAGCAGTG-3′ | (SEQ ID NO: 865) |
| | 5′-CAAAAUCAUCUGUGCCCAGCAGUGC-3′ | (SEQ ID NO: 1222) |
| | 3′-UGGUUUUAGUAGACACGGGUCGUCACG-5′ | (SEQ ID NO: 510) |
| EGFR-903 Target: | 5′-ACCAAAATCATCTGTGCCCAGCAGTGC-3′ | (SEQ ID NO: 866) |
| | 5′-AAAAUCAUCUGUGCCCAGCAGUGCU-3′ | (SEQ ID NO: 1223) |
| | 3′-GGUUUUAGUAGACACGGGUCGUCACGA-5′ | (SEQ ID NO: 511) |
| EGFR-904 Target: | 5′-CCAAAATCATCTGTGCCCAGCAGTGCT-3′ | (SEQ ID NO: 867) |
| | 5′-AAAUCAUCUGUGCCCAGCAGUGCUC-3′ | (SEQ ID NO: 1224) |
| | 3′-GUUUUAGUAGACACGGGUCGUCACGAG-5′ | (SEQ ID NO: 512) |
| EGFR-905 Target: | 5′-CAAAATCATCTGTGCCCAGCAGTGCTC-3′ | (SEQ ID NO: 868) |
| | 5′-CAGUGACUGCUGCCACAACCAGUGU-3′ | (SEQ ID NO: 1225) |
| | 3′-GGGUCACUGACGACGGUGUUGGUCACA-5′ | (SEQ ID NO: 513) |
| EGFR-954 Target: | 5′-CCCAGTGACTGCTGCCACAACCAGTGT-3′ | (SEQ ID NO: 869) |
| | 5′-AGUGACUGCUGCCACAACCAGUGUG-3′ | (SEQ ID NO: 1226) |
| | 3′-GGUCACUGACGACGGUGUUGGUCACAC-5′ | (SEQ ID NO: 514) |
| EGFR-955 Target: | 5′-CCAGTGACTGCTGCCACAACCAGTGTG-3′ | (SEQ ID NO: 870) |
| | 5′-GUGACUGCUGCCACAACCAGUGUGC-3′ | (SEQ ID NO: 1227) |
| | 3′-GUCACUGACGACGGUGUUGGUCACACG-5′ | (SEQ ID NO: 515) |
| EGFR-956 Target: | 5′-CAGTGACTGCTGCCACAACCAGTGTGC-3′ | (SEQ ID NO: 871) |
| | 5′-CACUCUCCAUAAAUGCUACGAAUAU-3′ | (SEQ ID NO: 1228) |
| | 3′-GAGUGAGAGGUAUUUACGAUGCUUAUA-5′ | (SEQ ID NO: 516) |
| EGFR-1313 Target: | 5′-CTCACTCTCCATAAATGCTACGAATAT-3′ | (SEQ ID NO: 872) |
| | 5′-UUUUUGCUGAUUCAGGCUUGGCCUG-3′ | (SEQ ID NO: 1229) |
| | 3′-CCAAAAACGACUAAGUCCGAACCGGAC-5′ | (SEQ ID NO: 517) |
| EGFR-1480 Target: | 5′-GGTTTTTGCTGATTCAGGCTTGGCCTG-3′ | (SEQ ID NO: 873) |
| | 5′-UUUUGCUGAUUCAGGCUUGGCCUGA-3′ | (SEQ ID NO: 1230) |
| | 3′-CAAAAACGACUAAGUCCGAACCGGACU-5′ | (SEQ ID NO: 518) |
| EGFR-1481 Target: | 5′-GTTTTTGCTGATTCAGGCTTGGCCTGA-3′ | (SEQ ID NO: 874) |
| | 5′-UUUGCUGAUUCAGGCUUGGCCUGAA-3′ | (SEQ ID NO: 1231) |
| | 3′-AAAAACGACUAAGUCCGAACCGGACUU-5′ | (SEQ ID NO: 519) |
| EGFR-1482 Target: | 5′-TTTTTGCTGATTCAGGCTTGGCCTGAA-3′ | (SEQ ID NO: 875) |
| | 5′-UUGCUGAUUCAGGCUUGGCCUGAAA-3′ | (SEQ ID NO: 1232) |
| | 3′-AAAACGACUAAGUCCGAACCGGACUUU-5′ | (SEQ ID NO: 520) |
| EGFR-1483 Target: | 5′-TTTTGCTGATTCAGGCTTGGCCTGAAA-3′ | (SEQ ID NO: 876) |
| | 5′-UGCUGAUUCAGGCUUGGCCUGAAAA-3′ | (SEQ ID NO: 1233) |
| | 3′-AAACGACUAAGUCCGAACCGGACUUUU-5′ | (SEQ ID NO: 521) |
| EGFR-1484 Target: | 5′-TTTGCTGATTCAGGCTTGGCCTGAAAA-3′ | (SEQ ID NO: 877) |
| | 5′-GCUGAUUCAGGCUUGGCCUGAAAAC-3′ | (SEQ ID NO: 1234) |
| | 3′-AACGACUAAGUCCGAACCGGACUUUUG-5′ | (SEQ ID NO: 522) |
| EGFR-1485 Target: | 5′-TTGCTGATTCAGGCTTGGCCTGAAAAC-3′ | (SEQ ID NO: 878) |
| | 5′-CUGAUUCAGGCUUGGCCUGAAAACA-3′ | (SEQ ID NO: 1235) |
| | 3′-ACGACUAAGUCCGAACCGGACUUUUGU-5′ | (SEQ ID NO: 523) |
| EGFR-1486 Target: | 5′-TGCTGATTCAGGCTTGGCCTGAAAACA-3′ | (SEQ ID NO: 879) |
| | 5′-UGAUUCAGGCUUGGCCUGAAAACAG-3′ | (SEQ ID NO: 1236) |
| | 3′-CGACUAAGUCCGAACCGGACUUUUGUC-5′ | (SEQ ID NO: 524) |
| EGFR-1487 Target: | 5′-GCTGATTCAGGCTTGGCCTGAAAACAG-3′ | (SEQ ID NO: 880) |
| | 5′-AAGCAACAUGGUCAGUUUUCUCUUG-3′ | (SEQ ID NO: 1237) |
| | 3′-GGUUCGUUGUACCAGUCAAAAGAGAAC-5′ | (SEQ ID NO: 525) |
| EGFR-1561 Target: | 5′-CCAAGCAACATGGTCAGTTTTCTCTTG-3′ | (SEQ ID NO: 881) |
| | 5′-AGCAACAUGGUCAGUUUUCUCUUGC-3′ | (SEQ ID NO: 1238) |
| | 3′-GUUCGUUGUACCAGUCAAAAGAGAACG-5′ | (SEQ ID NO: 526) |
| EGFR-1562 Target: | 5′-CAAGCAACATGGTCAGTTTTCTCTTGC-3′ | (SEQ ID NO: 882) |
| | 5′-GCAACAUGGUCAGUUUUCUCUUGCA-3′ | (SEQ ID NO: 1239) |
| | 3′-UUCGUUGUACCAGUCAAAAGAGAACGU-5′ | (SEQ ID NO: 527) |
| EGFR-1563 Target: | 5′-AAGCAACATGGTCAGTTTTCTCTTGCA-3′ | (SEQ ID NO: 883) |
| | 5′-CAAUAAACUGGAAAAAACUGUUUGG-3′ | (SEQ ID NO: 1240) |
| | 3′-AUGUUAUUUGACCUUUUUUGACAAACC-5′ | (SEQ ID NO: 528) |
| EGFR-1691 Target: | 5′-TACAATAAACTGGAAAAAACTGTTTGG-3′ | (SEQ ID NO: 884) |
| | 5′-CAGGCCAUGAACAUCACCUGCACAG-3′ | (SEQ ID NO: 1241) |
| | 3′-GAGUCCGGUACUUGUAGUGGACGUGUC-5′ | (SEQ ID NO: 529) |
| EGFR-1963 Target: | 5′-CTCAGGCCATGAACATCACCTGCACAG-3′ | (SEQ ID NO: 885) |
| | 5′-AGGCCAUGAACAUCACCUGCACAGG-3′ | (SEQ ID NO: 1242) |
| | 3′-AGUCCGGUACUUGUAGUGGACGUGUCC-5′ | (SEQ ID NO: 530) |
| EGFR-1964 Target: | 5′-TCAGGCCATGAACATCACCTGCACAGG-3′ | (SEQ ID NO: 886) |
| | 5′-AUCCAGUGUGCCCACUACAUUGACG-3′ | (SEQ ID NO: 1243) |
| | 3′-CAUAGGUCACACGGGUGAUGUAACUGC-5′ | (SEQ ID NO: 531) |
| EGFR-2008 Target: | 5′-GTATCCAGTGTGCCCACTACATTGACG-3′ | (SEQ ID NO: 887) |
| | 5′-UCCAGUGUGCCCACUACAUUGACGG-3′ | (SEQ ID NO: 1244) |
| | 3′-AUAGGUCACACGGGUGAUGUAACUGCC-5′ | (SEQ ID NO: 532) |
| EGFR-2009 Target: | 5′-TATCCAGTGTGCCCACTACATTGACGG-3′ | (SEQ ID NO: 888) |
| | 5′-CCAGUGUGCCCACUACAUUGACGGC-3′ | (SEQ ID NO: 1245) |
| | 3′-UAGGUCACACGGGUGAUGUAACUGCCG-5′ | (SEQ ID NO: 533) |
| EGFR-2010 Target: | 5′-ATCCAGTGTGCCCACTACATTGACGGC-3′ | (SEQ ID NO: 889) |
| | 5′-CAGUGUGCCCACUACAUUGACGGCC-3′ | (SEQ ID NO: 1246) |
| | 3′-AGGUCACACGGGUGAUGUAACUGCCGG-5′ | (SEQ ID NO: 534) |
| EGFR-2011 Target: | 5′-TCCAGTGTGCCCACTACATTGACGGCC-3′ | (SEQ ID NO: 890) |
| | 5′-AGUGUGCCCACUACAUUGACGGCCC-3′ | (SEQ ID NO: 1247) |
| | 3′-GGUCACACGGGUGAUGUAACUGCCGGG-5′ | (SEQ ID NO: 535) |
| EGFR-2012 Target: | 5′-CCAGTGTGCCCACTACATTGACGGCCC-3′ | (SEQ ID NO: 891) |
| | 5′-GAAUUCAAAAAGAUCAAAGUGCUGG-3′ | (SEQ ID NO: 1248) |
| | 3′-GACUUAAGUUUUUCUAGUUUCACGACC-5′ | (SEQ ID NO: 536) |
| EGFR-2401 Target: | 5′-CTGAATTCAAAAAGATCAAAGTGCTGG-3′ | (SEQ ID NO: 892) |
| | 5′-AAUUCAAAAAGAUCAAAGUGCUGGG-3′ | (SEQ ID NO: 1249) |
| | 3′-ACUUAAGUUUUUCUAGUUUCACGACCC-5′ | (SEQ ID NO: 537) |
| EGFR-2402 Target: | 5′-TGAATTCAAAAAGATCAAAGTGCTGGG-3′ | (SEQ ID NO: 893) |
| | 5′-CUCUGGAUCCCAGAAGGUGAGAAAG-3′ | (SEQ ID NO: 1250) |
| | 3′-CUGAGACCUAGGGUCUUCCACUCUUUC-5′ | (SEQ ID NO: 538) |
| EGFR-2458 Target: | 5′-GACTCTGGATCCCAGAAGGTGAGAAAG-3′ | (SEQ ID NO: 894) |
| | 5′-UCUGGAUCCCAGAAGGUGAGAAAGU-3′ | (SEQ ID NO: 1251) |
| | 3′-UGAGACCUAGGGUCUUCCACUCUUUCA-5′ | (SEQ ID NO: 539) |
| EGFR-2459 Target: | 5′-ACTCTGGATCCCAGAAGGTGAGAAAGT-3′ | (SEQ ID NO: 895) |
| | 5′-CUGGAUCCCAGAAGGUGAGAAAGUU-3′ | (SEQ ID NO: 1252) |
| | 3′-GAGACCUAGGGUCUUCCACUCUUUCAA-5′ | (SEQ ID NO: 540) |
| EGFR-2460 Target: | 5′-CTCTGGATCCCAGAAGGTGAGAAAGTT-3′ | (SEQ ID NO: 896) |
| | 5′-UGGAUCCCAGAAGGUGAGAAAGUUA-3′ | (SEQ ID NO: 1253) |
| | 3′-AGACCUAGGGUCUUCCACUCUUUCAAU-5′ | (SEQ ID NO: 541) |
| EGFR-2461 Target: | 5′-TCTGGATCCCAGAAGGTGAGAAAGTTA-3′ | (SEQ ID NO: 897) |
| | 5′-GGAUCCCAGAAGGUGAGAAAGUUAA-3′ | (SEQ ID NO: 1254) |
| | 3′-GACCUAGGGUCUUCCACUCUUUCAAUU-5′ | (SEQ ID NO: 542) |
| EGFR-2462 Target: | 5′-CTGGATCCCAGAAGGTGAGAAAGTTAA-3′ | (SEQ ID NO: 898) |
| | 5′-GAUCCCAGAAGGUGAGAAAGUUAAA-3′ | (SEQ ID NO: 1255) |
| | 3′-ACCUAGGGUCUUCCACUCUUUCAAUUU-5′ | (SEQ ID NO: 543) |
| EGFR-2463 Target: | 5′-TGGATCCCAGAAGGTGAGAAAGTTAAA-3′ | (SEQ ID NO: 899) |
| | 5′-AUCCCAGAAGGUGAGAAAGUUAAAA-3′ | (SEQ ID NO: 1256) |
| | 3′-CCUAGGGUCUUCCACUCUUUCAAUUUU-5′ | (SEQ ID NO: 544) |
| EGFR-2464 Target: | 5′-GGATCCCAGAAGGTGAGAAAGTTAAAA-3′ | (SEQ ID NO: 900) |
| | 5′-UCCCAGAAGGUGAGAAAGUUAAAAU-3′ | (SEQ ID NO: 1257) |
| | 3′-CUAGGGUCUUCCACUCUUUCAAUUUUA-5′ | (SEQ ID NO: 545) |
| EGFR-2465 Target: | 5′-GATCCCAGAAGGTGAGAAAGTTAAAAT-3′ | (SEQ ID NO: 901) |
| | 5′-CAGCAUGUCAAGAUCACAGAUUUUG-3′ | (SEQ ID NO: 1258) |
| | 3′-GCGUCGUACAGUUCUAGUGUCUAAAAC-5′ | (SEQ ID NO: 546) |
| EGFR-2815 Target: | 5′-CGCAGCATGTCAAGATCACAGATTTTG-3′ | (SEQ ID NO: 902) |
| | 5′-AGCAUGUCAAGAUCACAGAUUUUGG-3′ | (SEQ ID NO: 1259) |
| | 3′-CGUCGUACAGUUCUAGUGUCUAAAACC-5′ | (SEQ ID NO: 547) |
| EGFR-2816 Target: | 5′-GCAGCATGTCAAGATCACAGATTTTGG-3′ | (SEQ ID NO: 903) |
| | 5′-GCAUGUCAAGAUCACAGAUUUUGGG-3′ | (SEQ ID NO: 1260) |
| | 3′-GUCGUACAGUUCUAGUGUCUAAAACCC-5′ | (SEQ ID NO: 548) |
| EGFR-2817 Target: | 5′-CAGCATGTCAAGATCACAGATTTTGGG-3′ | (SEQ ID NO: 904) |
| | 5′-CAUGUCAAGAUCACAGAUUUUGGGC-3′ | (SEQ ID NO: 1261) |
| | 3′-UCGUACAGUUCUAGUGUCUAAAACCCG-5′ | (SEQ ID NO: 549) |
| EGFR-2818 Target: | 5′-AGCATGTCAAGATCACAGATTTTGGGC-3′ | (SEQ ID NO: 905) |
| | 5′-AUGUCAAGAUCACAGAUUUUGGGCU-3′ | (SEQ ID NO: 1262) |
| | 3′-CGUACAGUUCUAGUGUCUAAAACCCGA-5′ | (SEQ ID NO: 550) |
| EGFR-2819 Target: | 5′-GCATGTCAAGATCACAGATTTTGGGCT-3′ | (SEQ ID NO: 906) |
| | 5′-UGUCAAGAUCACAGAUUUUGGGCUG-3′ | (SEQ ID NO: 1263) |
| | 3′-GUACAGUUCUAGUGUCUAAAACCCGAC-5′ | (SEQ ID NO: 551) |
| EGFR-2820 Target: | 5′-CATGTCAAGATCACAGATTTTGGGCTG-3′ | (SEQ ID NO: 907) |
| | 5′-GUCAAGAUCACAGAUUUUGGGCUGG-3′ | (SEQ ID NO: 1264) |
| | 3′-UACAGUUCUAGUGUCUAAAACCCGACC-5′ | (SEQ ID NO: 552) |
| EGFR-2821 Target: | 5′-ATGTCAAGATCACAGATTTTGGGCTGG-3′ | (SEQ ID NO: 908) |
| | 5′-UCAAGAUCACAGAUUUUGGGCUGGC-3′ | (SEQ ID NO: 1265) |
| | 3′-ACAGUUCUAGUGUCUAAAACCCGACCG-5′ | (SEQ ID NO: 553) |
| EGFR-2822 Target: | 5′-TGTCAAGATCACAGATTTTGGGCTGGC-3′ | (SEQ ID NO: 909) |
| | 5′-CAAGAUCACAGAUUUUGGGCUGGCC-3′ | (SEQ ID NO: 1266) |
| | 3′-CAGUUCUAGUGUCUAAAACCCGACCGG-5′ | (SEQ ID NO: 554) |
| EGFR-2823 Target: | 5′-GTCAAGATCACAGATTTTGGGCTGGCC-3′ | (SEQ ID NO: 910) |
| | 5′-AAGAUCACAGAUUUUGGGCUGGCCA-3′ | (SEQ ID NO: 1267) |
| | 3′-AGUUCUAGUGUCUAAAACCCGACCGGU-5′ | (SEQ ID NO: 555) |
| EGFR-2824 Target: | 5′-TCAAGATCACAGATTTTGGGCTGGCCA-3′ | (SEQ ID NO: 911) |
| | 5′-AGAUCACAGAUUUUGGGCUGGCCAA-3′ | (SEQ ID NO: 1268) |
| | 3′-GUUCUAGUGUCUAAAACCCGACCGGUU-5′ | (SEQ ID NO: 556) |
| EGFR-2825 Target: | 5′-CAAGATCACAGATTTTGGGCTGGCCAA-3′ | (SEQ ID NO: 912) |
| | 5′-GAUCACAGAUUUUGGGCUGGCCAAA-3′ | (SEQ ID NO: 1269) |
| | 3′-UUCUAGUGUCUAAAACCCGACCGGUUU-5′ | (SEQ ID NO: 557) |
| EGFR-2826 Target: | 5′-AAGATCACAGATTTTGGGCTGGCCAAA-3′ | (SEQ ID NO: 913) |
| | 5′-AUCACAGAUUUUGGGCUGGCCAAAC-3′ | (SEQ ID NO: 1270) |
| | 3′-UCUAGUGUCUAAAACCCGACCGGUUUG-5′ | (SEQ ID NO: 558) |
| EGFR-2827 Target: | 5′-AGATCACAGATTTTGGGCTGGCCAAAC-3′ | (SEQ ID NO: 914) |
| | 5′-UCACAGAUUUUGGGCUGGCCAAACU-3′ | (SEQ ID NO: 1271) |
| | 3′-CUAGUGUCUAAAACCCGACCGGUUUGA-5′ | (SEQ ID NO: 559) |
| EGFR-2828 Target: | 5′-GATCACAGATTTTGGGCTGGCCAAACT-3′ | (SEQ ID NO: 915) |
| | 5′-CACAGAUUUUGGGCUGGCCAAACUG-3′ | (SEQ ID NO: 1272) |
| | 3′-UAGUGUCUAAAACCCGACCGGUUUGAC-5′ | (SEQ ID NO: 560) |
| EGFR-2829 Target: | 5′-ATCACAGATTTTGGGCTGGCCAAACTG-3′ | (SEQ ID NO: 916) |
| | 5′-ACAGAUUUUGGGCUGGCCAAACUGC-3′ | (SEQ ID NO: 1273) |
| | 3′-AGUGUCUAAAACCCGACCGGUUUGACG-5′ | (SEQ ID NO: 561) |
| EGFR-2830 Target: | 5′-TCACAGATTTTGGGCTGGCCAAACTGC-3′ | (SEQ ID NO: 917) |
| | 5′-CAGAUUUUGGGCUGGCCAAACUGCU-3′ | (SEQ ID NO: 1274) |
| | 3′-GUGUCUAAAACCCGACCGGUUUGACGA-5′ | (SEQ ID NO: 562) |
| EGFR-2831 Target: | 5′-CACAGATTTTGGGCTGGCCAAACTGCT-3′ | (SEQ ID NO: 918) |
| | 5′-AGAUUUUGGGCUGGCCAAACUGCUG-3′ | (SEQ ID NO: 1275) |
| | 3′-UGUCUAAAACCCGACCGGUUUGACGAC-5′ | (SEQ ID NO: 563) |
| EGFR-2832 Target: | 5′-ACAGATTTTGGGCTGGCCAAACTGCTG-3′ | (SEQ ID NO: 919) |
| | 5′-GAUUUUGGGCUGGCCAAACUGCUGG-3′ | (SEQ ID NO: 1276) |
| | 3′-GUCUAAAACCCGACCGGUUUGACGACC-5′ | (SEQ ID NO: 564) |
| EGFR-2833 Target: | 5′-CAGATTTTGGGCTGGCCAAACTGCTGG-3′ | (SEQ ID NO: 920) |
| | 5′-AUUUUGGGCUGGCCAAACUGCUGGG-3′ | (SEQ ID NO: 1277) |
| | 3′-UCUAAAACCCGACCGGUUUGACGACCC-5′ | (SEQ ID NO: 565) |
| EGFR-2834 Target: | 5′-AGATTTTGGGCTGGCCAAACTGCTGGG-3′ | (SEQ ID NO: 921) |
| | 5′-UUUUGGGCUGGCCAAACUGCUGGGU-3′ | (SEQ ID NO: 1278) |
| | 3′-CUAAAACCCGACCGGUUUGACGACCCA-5′ | (SEQ ID NO: 566) |
| EGFR-2835 Target: | 5′-GATTTTGGGCTGGCCAAACTGCTGGGT-3′ | (SEQ ID NO: 922) |
| | 5′-UUUGGGCUGGCCAAACUGCUGGGUG-3′ | (SEQ ID NO: 1279) |
| | 3′-UAAAACCCGACCGGUUUGACGACCCAC-5′ | (SEQ ID NO: 567) |
| EGFR-2836 Target: | 5′-ATTTTGGGCTGGCCAAACTGCTGGGTG-3′ | (SEQ ID NO: 923) |
| | 5′-UUGGGCUGGCCAAACUGCUGGGUGC-3′ | (SEQ ID NO: 1280) |
| | 3′-AAAACCCGACCGGUUUGACGACCCACG-5′ | (SEQ ID NO: 568) |
| EGFR-2837 Target: | 5′-TTTTGGGCTGGCCAAACTGCTGGGTGC-3′ | (SEQ ID NO: 924) |
| | 5′-GCAAAGUGCCUAUCAAGUGGAUGGC-3′ | (SEQ ID NO: 1281) |
| | 3′-UCCGUUUCACGGAUAGUUCACCUACCG-5′ | (SEQ ID NO: 569) |
| EGFR-2891 Target: | 5′-AGGCAAAGTGCCTATCAAGTGGATGGC-3′ | (SEQ ID NO: 925) |
| | 5′-CAAAGUGCCUAUCAAGUGGAUGGCA-3′ | (SEQ ID NO: 1282) |
| | 3′-CCGUUUCACGGAUAGUUCACCUACCGU-5′ | (SEQ ID NO: 570) |
| EGFR-2892 Target: | 5′-GGCAAAGTGCCTATCAAGTGGATGGCA-3′ | (SEQ ID NO: 926) |
| | 5′-AAAGUGCCUAUCAAGUGGAUGGCAU-3′ | (SEQ ID NO: 1283) |
| | 3′-CGUUUCACGGAUAGUUCACCUACCGUA-5′ | (SEQ ID NO: 571) |
| EGFR-2893 Target: | 5′-GCAAAGTGCCTATCAAGTGGATGGCAT-3′ | (SEQ ID NO: 927) |
| | 5′-AAGUGCCUAUCAAGUGGAUGGCAUU-3′ | (SEQ ID NO: 1284) |
| | 3′-GUUUCACGGAUAGUUCACCUACCGUAA-5′ | (SEQ ID NO: 572) |
| EGFR-2894 Target: | 5′-CAAAGTGCCTATCAAGTGGATGGCATT-3′ | (SEQ ID NO: 928) |
| | 5′-AGUGCCUAUCAAGUGGAUGGCAUUG-3′ | (SEQ ID NO: 1285) |
| | 3′-UUUCACGGAUAGUUCACCUACCGUAAC-5′ | (SEQ ID NO: 573) |
| EGFR-2895 Target: | 5′-AAAGTGCCTATCAAGTGGATGGCATTG-3′ | (SEQ ID NO: 929) |
| | 5′-GUGCCUAUCAAGUGGAUGGCAUUGG-3′ | (SEQ ID NO: 1286) |
| | 3′-UUCACGGAUAGUUCACCUACCGUAACC-5′ | (SEQ ID NO: 574) |
| EGFR-2896 Target: | 5′-AAGTGCCTATCAAGTGGATGGCATTGG-3′ | (SEQ ID NO: 930) |
| | 5′-UGCCUAUCAAGUGGAUGGCAUUGGA-3′ | (SEQ ID NO: 1287) |
| | 3′-UCACGGAUAGUUCACCUACCGUAACCU-5′ | (SEQ ID NO: 575) |
| EGFR-2897 Target: | 5′-AGTGCCTATCAAGTGGATGGCATTGGA-3′ | (SEQ ID NO: 931) |
| | 5′-ACCAUCGAUGUCUACAUGAUCAUGG-3′ | (SEQ ID NO: 1288) |
| | 3′-CAUGGUAGCUACAGAUGUACUAGUACC-5′ | (SEQ ID NO: 576) |
| EGFR-3088 Target: | 5′-GTACCATCGATGTCTACATGATCATGG-3′ | (SEQ ID NO: 932) |
| | 5′-CCAUCGAUGUCUACAUGAUCAUGGU-3′ | (SEQ ID NO: 1289) |
| | 3′-AUGGUAGCUACAGAUGUACUAGUACCA-5′ | (SEQ ID NO: 577) |
| EGFR-3089 Target: | 5′-TACCATCGATGTCTACATGATCATGGT-3′ | (SEQ ID NO: 933) |
| | 5′-CAUCGAUGUCUACAUGAUCAUGGUC-3′ | (SEQ ID NO: 1290) |
| | 3′-UGGUAGCUACAGAUGUACUAGUACCAG-5′ | (SEQ ID NO: 578) |
| EGFR-3090 Target: | 5′-ACCATCGATGTCTACATGATCATGGTC-3′ | (SEQ ID NO: 934) |
| | 5′-AUCGAUGUCUACAUGAUCAUGGUCA-3′ | (SEQ ID NO: 1291) |
| | 3′-GGUAGCUACAGAUGUACUAGUACCAGU-5′ | (SEQ ID NO: 579) |
| EGFR-3091 Target: | 5′-CCATCGATGTCTACATGATCATGGTCA-3′ | (SEQ ID NO: 935) |
| | 5′-UCGAUGUCUACAUGAUCAUGGUCAA-3′ | (SEQ ID NO: 1292) |
| | 3′-GUAGCUACAGAUGUACUAGUACCAGUU-5′ | (SEQ ID NO: 580) |
| EGFR-3092 Target: | 5′-CATCGATGTCTACATGATCATGGTCAA-3′ | (SEQ ID NO: 936) |
| | 5′-CGAUGUCUACAUGAUCAUGGUCAAG-3′ | (SEQ ID NO: 1293) |
| | 3′-UAGCUACAGAUGUACUAGUACCAGUUC-5′ | (SEQ ID NO: 581) |
| EGFR-3093 Target: | 5′-ATCGATGTCTACATGATCATGGTCAAG-3′ | (SEQ ID NO: 937) |
| | 5′-GAUGUCUACAUGAUCAUGGUCAAGU-3′ | (SEQ ID NO: 1294) |
| | 3′-AGCUACAGAUGUACUAGUACCAGUUCA-5′ | (SEQ ID NO: 582) |
| EGFR-3094 Target: | 5′-TCGATGTCTACATGATCATGGTCAAGT-3′ | (SEQ ID NO: 938) |
| | 5′-AUGUCUACAUGAUCAUGGUCAAGUG-3′ | (SEQ ID NO: 1295) |
| | 3′-GCUACAGAUGUACUAGUACCAGUUCAC-5′ | (SEQ ID NO: 583) |
| EGFR-3095 Target: | 5′-CGATGTCTACATGATCATGGTCAAGTG-3′ | (SEQ ID NO: 939) |
| | 5′-UGUCUACAUGAUCAUGGUCAAGUGC-3′ | (SEQ ID NO: 1296) |
| | 3′-CUACAGAUGUACUAGUACCAGUUCACG-5′ | (SEQ ID NO: 584) |
| EGFR-3096 Target: | 5′-GATGTCTACATGATCATGGTCAAGTGC-3′ | (SEQ ID NO: 940) |
| | 5′-GUCUACAUGAUCAUGGUCAAGUGCU-3′ | (SEQ ID NO: 1297) |
| | 3′-UACAGAUGUACUAGUACCAGUUCACGA-5′ | (SEQ ID NO: 585) |
| EGFR-3097 Target: | 5′-ATGTCTACATGATCATGGTCAAGTGCT-3′ | (SEQ ID NO: 941) |
| | 5′-UCUACAUGAUCAUGGUCAAGUGCUG-3′ | (SEQ ID NO: 1298) |
| | 3′-ACAGAUGUACUAGUACCAGUUCACGAC-5′ | (SEQ ID NO: 586) |
| EGFR-3098 Target: | 5′-TGTCTACATGATCATGGTCAAGTGCTG-3′ | (SEQ ID NO: 942) |
| | 5′-CUACAUGAUCAUGGUCAAGUGCUGG-3′ | (SEQ ID NO: 1299) |
| | 3′-CAGAUGUACUAGUACCAGUUCACGACC-5′ | (SEQ ID NO: 587) |
| EGFR-3099 Target: | 5′-GTCTACATGATCATGGTCAAGTGCTGG-3′ | (SEQ ID NO: 943) |
| | 5′-UACAUGAUCAUGGUCAAGUGCUGGA-3′ | (SEQ ID NO: 1300) |
| | 3′-AGAUGUACUAGUACCAGUUCACGACCU-5′ | (SEQ ID NO: 588) |
| EGFR-3100 Target: | 5′-TCTACATGATCATGGTCAAGTGCTGGA-3′ | (SEQ ID NO: 944) |
| | 5′-ACAUGAUCAUGGUCAAGUGCUGGAU-3′ | (SEQ ID NO: 1301) |
| | 3′-GAUGUACUAGUACCAGUUCACGACCUA-5′ | (SEQ ID NO: 589) |
| EGFR-3101 Target: | 5′-CTACATGATCATGGTCAAGTGCTGGAT-3′ | (SEQ ID NO: 945) |
| | 5′-CAUGAUCAUGGUCAAGUGCUGGAUG-3′ | (SEQ ID NO: 1302) |
| | 3′-AUGUACUAGUACCAGUUCACGACCUAC-5′ | (SEQ ID NO: 590) |
| EGFR-3102 Target: | 5′-TACATGATCATGGTCAAGTGCTGGATG-3′ | (SEQ ID NO: 946) |
| | 5′-AUGAUCAUGGUCAAGUGCUGGAUGA-3′ | (SEQ ID NO: 1303) |
| | 3′-UGUACUAGUACCAGUUCACGACCUACU-5′ | (SEQ ID NO: 591) |
| EGFR-3103 Target: | 5′-ACATGATCATGGTCAAGTGCTGGATGA-3′ | (SEQ ID NO: 947) |
| | 5′-UGAUCAUGGUCAAGUGCUGGAUGAU-3′ | (SEQ ID NO: 1304) |
| | 3′-GUACUAGUACCAGUUCACGACCUACUA-5′ | (SEQ ID NO: 592) |
| EGFR-3104 Target: | 5′-CATGATCATGGTCAAGTGCTGGATGAT-3′ | (SEQ ID NO: 948) |
| | 5′-GAUCAUGGUCAAGUGCUGGAUGAUA-3′ | (SEQ ID NO: 1305) |
| | 3′-UACUAGUACCAGUUCACGACCUACUAU-5′ | (SEQ ID NO: 593) |
| EGFR-3105 Target: | 5′-ATGATCATGGTCAAGTGCTGGATGATA-3′ | (SEQ ID NO: 949) |
| | 5′-AUCAUGGUCAAGUGCUGGAUGAUAG-3′ | (SEQ ID NO: 1306) |
| | 3′-ACUAGUACCAGUUCACGACCUACUAUC-5′ | (SEQ ID NO: 594) |
| EGFR-3106 Target: | 5′-TGATCATGGTCAAGTGCTGGATGATAG-3′ | (SEQ ID NO: 950) |
| | 5′-UCAUGGUCAAGUGCUGGAUGAUAGA-3′ | (SEQ ID NO: 1307) |
| | 3′-CUAGUACCAGUUCACGACCUACUAUCU-5′ | (SEQ ID NO: 595) |
| EGFR-3107 Target: | 5′-GATCATGGTCAAGTGCTGGATGATAGA-3′ | (SEQ ID NO: 951) |
| | 5′-CAUGGUCAAGUGCUGGAUGAUAGAC-3′ | (SEQ ID NO: 1308) |
| | 3′-UAGUACCAGUUCACGACCUACUAUCUG-5′ | (SEQ ID NO: 596) |
| EGFR-3108 Target: | 5′-ATCATGGTCAAGTGCTGGATGATAGAC-3′ | (SEQ ID NO: 952) |
| | 5′-AUGGUCAAGUGCUGGAUGAUAGACG-3′ | (SEQ ID NO: 1309) |
| | 3′-AGUACCAGUUCACGACCUACUAUCUGC-5′ | (SEQ ID NO: 597) |
| EGFR-3109 Target: | 5′-TCATGGTCAAGTGCTGGATGATAGACG-3′ | (SEQ ID NO: 953) |
| | 5′-UGGUCAAGUGCUGGAUGAUAGACGC-3′ | (SEQ ID NO: 1310) |
| | 3′-GUACCAGUUCACGACCUACUAUCUGCG-5′ | (SEQ ID NO: 598) |
| EGFR-3110 Target: | 5′-CATGGTCAAGTGCTGGATGATAGACGC-3′ | (SEQ ID NO: 954) |
| | 5′-GGUCAAGUGCUGGAUGAUAGACGCA-3′ | (SEQ ID NO: 1311) |
| | 3′-UACCAGUUCACGACCUACUAUCUGCGU-5′ | (SEQ ID NO: 599) |
| EGFR-3111 Target: | 5′-ATGGTCAAGTGCTGGATGATAGACGCA-3′ | (SEQ ID NO: 955) |
| | 5′-GUCAAGUGCUGGAUGAUAGACGCAG-3′ | (SEQ ID NO: 1312) |
| | 3′-ACCAGUUCACGACCUACUAUCUGCGUC-5′ | (SEQ ID NO: 600) |
| EGFR-3112 Target: | 5′-TGGTCAAGTGCTGGATGATAGACGCAG-3′ | (SEQ ID NO: 956) |
| | 5′-UCAAGUGCUGGAUGAUAGACGCAGA-3′ | (SEQ ID NO: 1313) |
| | 3′-CCAGUUCACGACCUACUAUCUGCGUCU-5′ | (SEQ ID NO: 601) |
| EGFR-3113 Target: | 5′-GGTCAAGTGCTGGATGATAGACGCAGA-3′ | (SEQ ID NO: 957) |
| | 5′-GAAUUCUCCAAAAUGGCCCGAGACC-3′ | (SEQ ID NO: 1314) |
| | 3′-AGCUUAAGAGGUUUUACCGGGCUCUGG-5′ | (SEQ ID NO: 602) |
| EGFR-3169 Target: | 5′-TCGAATTCTCCAAAATGGCCCGAGACC-3′ | (SEQ ID NO: 958) |
| | 5′-AAUUCUCCAAAAUGGCCCGAGACCC-3′ | (SEQ ID NO: 1315) |
| | 3′-GCUUAAGAGGUUUUACCGGGCUCUGGG-5′ | (SEQ ID NO: 603) |
| EGFR-3170 Target: | 5′-CGAATTCTCCAAAATGGCCCGAGACCC-3′ | (SEQ ID NO: 959) |
| | 5′-GAUGAAAGAAUGCAUUUGCCAAGUC-3′ | (SEQ ID NO: 1316) |
| | 3′-CCCUACUUUCUUACGUAAACGGUUCAG-5′ | (SEQ ID NO: 604) |
| EGFR-3220 Target: | 5′-GGGATGAAAGAATGCATTTGCCAAGTC-3′ | (SEQ ID NO: 960) |
| | 5′-AUGAAAGAAUGCAUUUGCCAAGUCC-3′ | (SEQ ID NO: 1317) |
| | 3′-CCUACUUUCUUACGUAAACGGUUCAGG-5′ | (SEQ ID NO: 605) |
| EGFR-3221 Target: | 5′-GGATGAAAGAATGCATTTGCCAAGTCC-3′ | (SEQ ID NO: 961) |
| | 5′-UGAAAGAAUGCAUUUGCCAAGUCCU-3′ | (SEQ ID NO: 1318) |
| | 3′-CUACUUUCUUACGUAAACGGUUCAGGA-5′ | (SEQ ID NO: 606) |
| EGFR-3222 Target: | 5′-GATGAAAGAATGCATTTGCCAAGTCCT-3′ | (SEQ ID NO: 962) |
| | 5′-GAAAGAAUGCAUUUGCCAAGUCCUA-3′ | (SEQ ID NO: 1319) |
| | 3′-UACUUUCUUACGUAAACGGUUCAGGAU-5′ | (SEQ ID NO: 607) |
| EGFR-3223 Target: | 5′-ATGAAAGAATGCATTTGCCAAGTCCTA-3′ | (SEQ ID NO: 963) |
| | 5′-AAAGAAUGCAUUUGCCAAGUCCUAC-3′ | (SEQ ID NO: 1320) |
| | 3′-ACUUUCUUACGUAAACGGUUCAGGAUG-5′ | (SEQ ID NO: 608) |
| EGFR-3224 Target: | 5′-TGAAAGAATGCATTTGCCAAGTCCTAC-3′ | (SEQ ID NO: 964) |
| | 5′-GACAACCCUGACUACCAGCAGGACU-3′ | (SEQ ID NO: 1321) |
| | 3′-ACCUGUUGGGACUGAUGGUCGUCCUGA-5′ | (SEQ ID NO: 609) |
| EGFR-3772 Target: | 5′-TGGACAACCCTGACTACCAGCAGGACT-3′ | (SEQ ID NO: 965) |
| | 5′-ACAACCCUGACUACCAGCAGGACUU-3′ | (SEQ ID NO: 1322) |
| | 3′-CCUGUUGGGACUGAUGGUCGUCCUGAA-5′ | (SEQ ID NO: 610) |
| EGFR-3773 Target: | 5′-GGACAACCCTGACTACCAGCAGGACTT-3′ | (SEQ ID NO: 966) |
| | 5′-CAACCCUGACUACCAGCAGGACUUC-3′ | (SEQ ID NO: 1323) |
| | 3′-CUGUUGGGACUGAUGGUCGUCCUGAAG-5′ | (SEQ ID NO: 611) |
| EGFR-3774 Target: | 5′-GACAACCCTGACTACCAGCAGGACTTC-3′ | (SEQ ID NO: 967) |
| | 5′-AACCCUGACUACCAGCAGGACUUCU-3′ | (SEQ ID NO: 1324) |
| | 3′-UGUUGGGACUGAUGGUCGUCCUGAAGA-5′ | (SEQ ID NO: 612) |
| EGFR-3775 Target: | 5′-ACAACCCTGACTACCAGCAGGACTTCT-3′ | (SEQ ID NO: 968) |
| | 5′-ACCCUGACUACCAGCAGGACUUCUU-3′ | (SEQ ID NO: 1325) |
| | 3′-GUUGGGACUGAUGGUCGUCCUGAAGAA-5′ | (SEQ ID NO: 613) |
| EGFR-3776 Target: | 5′-CAACCCTGACTACCAGCAGGACTTCTT-3′ | (SEQ ID NO: 969) |
| | 5′-CCCUGACUACCAGCAGGACUUCUUU-3′ | (SEQ ID NO: 1326) |
| | 3′-UUGGGACUGAUGGUCGUCCUGAAGAAA-5′ | (SEQ ID NO: 614) |
| EGFR-3777 Target: | 5′-AACCCTGACTACCAGCAGGACTTCTTT-3′ | (SEQ ID NO: 970) |
| | 5′-CCUGACUACCAGCAGGACUUCUUUC-3′ | (SEQ ID NO: 1327) |
| | 3′-UGGGACUGAUGGUCGUCCUGAAGAAAG-5′ | (SEQ ID NO: 615) |
| EGFR-3778 Target: | 5′-ACCCTGACTACCAGCAGGACTTCTTTC-3′ | (SEQ ID NO: 971) |
| | 5′-CUGACUACCAGCAGGACUUCUUUCC-3′ | (SEQ ID NO: 1328) |
| | 3′-GGGACUGAUGGUCGUCCUGAAGAAAGG-5′ | (SEQ ID NO: 616) |
| EGFR-3779 Target: | 5′-CCCTGACTACCAGCAGGACTTCTTTCC-3′ | (SEQ ID NO: 972) |

TABLE 4
Selected Mouse Anti-EGFR DsiRNAs (Asymmetrics)

| | | |
|---|---|---|
| | 5′-GCGCAACGCGCAGCAGCCUCCCUcc-3′ | (SEQ ID NO: 261) |
| | 3′-GUCGCGUUGCGCGUCGUCGGAGGGAGG-5′ | (SEQ ID NO: 617) |
| EGFR-m71 Target: | 5′-CAGCGCAACGCGCAGCAGCCTCCCTCC-3′ | (SEQ ID NO: 973) |
| | 5′-GCGCAGCAGCCUCCCUCCUCUUCtt-3′ | (SEQ ID NO: 262) |
| | 3′-UGCGCGUCGUCGGAGGGAGGAGAAGAA-5′ | (SEQ ID NO: 618) |
| EGFR-m78 Target: | 5′-ACGCGCAGCAGCCTCCCTCCTCTTCTT-3′ | (SEQ ID NO: 974) |
| | 5′-CCUCCCUCCUCUUCUUCCCGCACtg-3′ | (SEQ ID NO: 263) |
| | 3′-UCGGAGGGAGGAGAAGAAGGGCGUGAC-5′ | (SEQ ID NO: 619) |
| EGFR-m87 Target: | 5′-AGCCTCCCTCCTCTTCTTCCCGCACTG-3′ | (SEQ ID NO: 975) |
| | 5′-CCCUCCUCUUCUUCCCGCACUGUgc-3′ | (SEQ ID NO: 264) |
| | 3′-GAGGGAGGAGAAGAAGGGCGUGACACG-5′ | (SEQ ID NO: 620) |
| EGFR-m90 Target: | 5′-CTCCCTCCTCTTCTTCCCGCACTGTGC-3′ | (SEQ ID NO: 976) |
| | 5′-CUCCUCUUCUUCCCGCACUGUGCgc-3′ | (SEQ ID NO: 265) |
| | 3′-GGGAGGAGAAGAAGGGCGUGACACGCG-5′ | (SEQ ID NO: 621) |
| EGFR-m92 Target: | 5′-CCCTCCTCTTCTTCCCGCACTGTGCGC-3′ | (SEQ ID NO: 977) |
| | 5′-CCUCUUCUUCCCGCACUGUGCGCtc-3′ | (SEQ ID NO: 266) |
| | 3′-GAGGAGAAGAAGGGCGUGACACGCGAG-5′ | (SEQ ID NO: 622) |
| EGFR-m94 Target: | 5′-CTCCTCTTCTTCCCGCACTGTGCGCTC-3′ | (SEQ ID NO: 978) |
| | 5′-CUUCUUCCCGCACUGUGCGCUCCtc-3′ | (SEQ ID NO: 267) |
| | 3′-GAGAAGAAGGGCGUGACACGCGAGGAG-5′ | (SEQ ID NO: 623) |
| EGFR-m97 Target: | 5′-CTCTTCTTCCCGCACTGTGCGCTCCTC-3′ | (SEQ ID NO: 979) |
| | 5′-UCUUCCCGCACUGUGCGCUCCUCct-3′ | (SEQ ID NO: 268) |
| | 3′-GAAGAAGGGCGUGACACGCGAGGAGGA-5′ | (SEQ ID NO: 624) |
| EGFR-m99 Target: | 5′-CTTCTTCCCGCACTGTGCGCTCCTCCT-3′ | (SEQ ID NO: 980) |
| | 5′-CUUCCCGCACUGUGCGCUCCUCCtg-3′ | (SEQ ID NO: 269) |
| | 3′-AAGAAGGGCGUGACACGCGAGGAGGAC-5′ | (SEQ ID NO: 625) |
| EGFR-m100 Target: | 5′-TTCTTCCCGCACTGTGCGCTCCTCCTG-3′ | (SEQ ID NO: 981) |
| | 5′-UUCCCGCACUGUGCGCUCCUCCUgg-3′ | (SEQ ID NO: 270) |
| | 3′-AGAAGGGCGUGACACGCGAGGAGGACC-5′ | (SEQ ID NO: 626) |
| EGFR-m101 Target: | 5′-TCTTCCCGCACTGTGCGCTCCTCCTGG-3′ | (SEQ ID NO: 982) |
| | 5′-GUGCGCUCCUCCUGGGCUAGGGCgt-3′ | (SEQ ID NO: 271) |
| | 3′-GACACGCGAGGAGGACCCGAUCCCGCA-5′ | (SEQ ID NO: 627) |
| EGFR-m111 Target: | 5′-CTGTGCGCTCCTCCTGGGCTAGGGCGT-3′ | (SEQ ID NO: 983) |
| | 5′-CGCUCCUCCUGGGCUAGGGCGUCtg-3′ | (SEQ ID NO: 272) |
| | 3′-ACGCGAGGAGGACCCGAUCCCGCAGAC-5′ | (SEQ ID NO: 628) |
| EGFR-m114 Target: | 5′-TGCGCTCCTCCTGGGCTAGGGCGTCTG-3′ | (SEQ ID NO: 984) |
| | 5′-CACUGCUGGUGUUGCUGACCGCGct-3′ | (SEQ ID NO: 273) |
| | 3′-GUGUGACGACCACAACGACUGGCGCGA-5′ | (SEQ ID NO: 629) |
| EGFR-m333 Target: | 5′-CACACTGCTGGTGTTGCTGACCGCGCT-3′ | (SEQ ID NO: 985) |
| | 5′-ACUGCUGGUGUUGCUGACCGCGCtc-3′ | (SEQ ID NO: 274) |
| | 3′-UGUGACGACCACAACGACUGGCGCGAG-5′ | (SEQ ID NO: 630) |
| EGFR-m334 Target: | 5′-ACACTGCTGGTGTTGCTGACCGCGCTC-3′ | (SEQ ID NO: 986) |
| | 5′-CUGCUGGUGUUGCUGACCGCGCUct-3′ | (SEQ ID NO: 275) |
| | 3′-GUGACGACCACAACGACUGGCGCGAGA-5′ | (SEQ ID NO: 631) |
| EGFR-m335 Target: | 5′-CACTGCTGGTGTTGCTGACCGCGCTCT-3′ | (SEQ ID NO: 987) |
| | 5′-UGCUGGUGUUGCUGACCGCGCUCtg-3′ | (SEQ ID NO: 276) |
| | 3′-UGACGACCACAACGACUGGCGCGAGAC-5′ | (SEQ ID NO: 632) |
| EGFR-m336 Target: | 5′-ACTGCTGGTGTTGCTGACCGCGCTCTG-3′ | (SEQ ID NO: 988) |
| | 5′-GCUGGUGUUGCUGACCGCGCUCUgc-3′ | (SEQ ID NO: 277) |
| | 3′-GACGACCACAACGACUGGCGCGAGACG-5′ | (SEQ ID NO: 633) |
| EGFR-m337 Target: | 5′-CTGCTGGTGTTGCTGACCGCGCTCTGC-3′ | (SEQ ID NO: 989) |
| | 5′-CUGGUGUUGCUGACCGCGCUCUGcg-3′ | (SEQ ID NO: 278) |
| | 3′-ACGACCACAACGACUGGCGCGAGACGC-5′ | (SEQ ID NO: 634) |
| EGFR-m338 Target: | 5′-TGCTGGTGTTGCTGACCGCGCTCTGCG-3′ | (SEQ ID NO: 990) |
| | 5′-UGGUGUUGCUGACCGCGCUCUGCgc-3′ | (SEQ ID NO: 279) |
| | 3′-CGACCACAACGACUGGCGCGAGACGCG-5′ | (SEQ ID NO: 635) |
| EGFR-m339 Target: | 5′-GCTGGTGTTGCTGACCGCGCTCTGCGC-3′ | (SEQ ID NO: 991) |
| | 5′-GUGUUGCUGACCGCGCUCUGCGCcg-3′ | (SEQ ID NO: 280) |
| | 3′-ACCACAACGACUGGCGCGAGACGCGGC-5′ | (SEQ ID NO: 636) |
| EGFR-m341 Target: | 5′-TGGTGTTGCTGACCGCGCTCTGCGCCG-3′ | (SEQ ID NO: 992) |
| | 5′-UGUUGCUGACCGCGCUCUGCGCCgc-3′ | (SEQ ID NO: 281) |
| | 3′-CCACAACGACUGGCGCGAGACGCGGCG-5′ | (SEQ ID NO: 637) |
| EGFR-m342 Target: | 5′-GGTGTTGCTGACCGCGCTCTGCGCCGC-3′ | (SEQ ID NO: 993) |
| | 5′-GUUGCUGACCGCGCUCUGCGCCGca-3′ | (SEQ ID NO: 282) |
| | 3′-CACAACGACUGGCGCGAGACGCGGCGU-5′ | (SEQ ID NO: 638) |
| EGFR-m343 Target: | 5′-GTGTTGCTGACCGCGCTCTGCGCCGCA-3′ | (SEQ ID NO: 994) |
| | 5′-UUGCUGACCGCGCUCUGCGCCGCag-3′ | (SEQ ID NO: 283) |
| | 3′-ACAACGACUGGCGCGAGACGCGGCGUC-5′ | (SEQ ID NO: 639) |
| EGFR-m344 Target: | 5′-TGTTGCTGACCGCGCTCTGCGCCGCAG-3′ | (SEQ ID NO: 995) |
| | 5′-CUGACCGCGCUCUGCGCCGCAGGtg-3′ | (SEQ ID NO: 284) |
| | 3′-ACGACUGGCGCGAGACGCGGCGUCCAC-5′ | (SEQ ID NO: 640) |
| EGFR-m347 Target: | 5′-TGCTGACCGCGCTCTGCGCCGCAGGTG-3′ | (SEQ ID NO: 996) |
| | 5′-UGACCGCGCUCUGCGCCGCAGGUgg-3′ | (SEQ ID NO: 285) |
| | 3′-CGACUGGCGCGAGACGCGGCGUCCACC-5′ | (SEQ ID NO: 641) |
| EGFR-m348 Target: | 5′-GCTGACCGCGCTCTGCGCCGCAGGTGG-3′ | (SEQ ID NO: 997) |
| | 5′-CUGAUUGGUGCUGUGCGAUUCAGca-3′ | (SEQ ID NO: 286) |
| | 3′-AGGACUAACCACGACACGCUAAGUCGU-5′ | (SEQ ID NO: 642) |
| EGFR-m734 Target: | 5′-TCCTGATTGGTGCTGTGCGATTCAGCA-3′ | (SEQ ID NO: 998) |
| | 5′-UGAUUGGUGCUGUGCGAUUCAGCaa-3′ | (SEQ ID NO: 287) |
| | 3′-GGACUAACCACGACACGCUAAGUCGUU-5′ | (SEQ ID NO: 643) |
| EGFR-m735 Target: | 5′-CCTGATTGGTGCTGTGCGATTCAGCAA-3′ | (SEQ ID NO: 999) |
| | 5′-GAUUGGUGCUGUGCGAUUCAGCAac-3′ | (SEQ ID NO: 288) |
| | 3′-GACUAACCACGACACGCUAAGUCGUUG-5′ | (SEQ ID NO: 644) |
| EGFR-m736 Target: | 5′-CTGATTGGTGCTGTGCGATTCAGCAAC-3′ | (SEQ ID NO: 1000) |
| | 5′-UUGGUGCUGUGCGAUUCAGCAACaa-3′ | (SEQ ID NO: 289) |
| | 3′-CUAACCACGACACGCUAAGUCGUUGUU-5′ | (SEQ ID NO: 645) |
| EGFR-m738 Target: | 5′-GATTGGTGCTGTGCGATTCAGCAACAA-3′ | (SEQ ID NO: 1001) |
| | 5′-GGUGCUGUGCGAUUCAGCAACAAcc-3′ | (SEQ ID NO: 290) |
| | 3′-AACCACGACACGCUAAGUCGUUGUUGG-5′ | (SEQ ID NO: 646) |
| EGFR-m740 Target: | 5′-TTGGTGCTGTGCGATTCAGCAACAACC-3′ | (SEQ ID NO: 1002) |
| | 5′-GUGCUGUGCGAUUCAGCAACAACcc-3′ | (SEQ ID NO: 291) |
| | 3′-ACCACGACACGCUAAGUCGUUGUUGGG-5′ | (SEQ ID NO: 647) |
| EGFR-m741 Target: | 5′-TGGTGCTGTGCGATTCAGCAACAACCC-3′ | (SEQ ID NO: 1003) |
| | 5′-CAAGCUGUCCCAAUGGAAGCUGCtg-3′ | (SEQ ID NO: 292) |
| | 3′-AGGUUCGACAGGGUUACCUUCGACGAC-5′ | (SEQ ID NO: 648) |
| EGFR-m879 Target: | 5′-TCCAAGCTGTCCCAATGGAAGCTGCTG-3′ | (SEQ ID NO: 1004) |
| | 5′-GUGCCCAGCAAUGUUCCCAUCGCtg-3′ | (SEQ ID NO: 293) |
| | 3′-GACACGGGUCGUUACAAGGGUAGCGAC-5′ | (SEQ ID NO: 649) |
| EGFR-m948 Target: | 5′-CTGTGCCCAGCAATGTTCCCATCGCTG-3′ | (SEQ ID NO: 1005) |
| | 5′-AAGUACAGCUUUGGUGCCACCUGtg-3′ | (SEQ ID NO: 294) |
| | 3′-CCUUCAUGUCGAAACCACGGUGGACAC-5′ | (SEQ ID NO: 650) |
| EGFR-m1154 Target: | 5′-GGAAGTACAGCTTTGGTGCCACCTGTG-3′ | (SEQ ID NO: 1006) |
| | 5′-GUCGCAAAGUUUGUAAUGGCAUAgg-3′ | (SEQ ID NO: 295) |
| | 3′-GACAGCGUUUCAAACAUUACCGUAUCC-5′ | (SEQ ID NO: 651) |
| EGFR-m1302 Target: | 5′-CTGTCGCAAAGTTTGTAATGGCATAGG-3′ | (SEQ ID NO: 1007) |
| | 5′-GAUUCUUUCACGCGCACUCCUCCtc-3′ | (SEQ ID NO: 296) |
| | 3′-CCCUAAGAAAGUGCGCGUGAGGAGGAG-5′ | (SEQ ID NO: 652) |
| EGFR-m1439 Target: | 5′-GGGATTCTTTCACGCGCACTCCTCCTC-3′ | (SEQ ID NO: 1008) |
| | 5′-CAGGCUUUUUGCUGAUUCAGGCUtg-3′ | (SEQ ID NO: 297) |
| | 3′-UUGUCCGAAAAACGACUAAGUCCGAAC-5′ | (SEQ ID NO: 653) |
| EGFR-m1509 Target: | 5′-AACAGGCTTTTTGCTGATTCAGGCTTG-3′ | (SEQ ID NO: 1009) |
| | 5′-CAGGCUUGGCCUGAUAACUGGACtg-3′ | (SEQ ID NO: 298) |
| | 3′-AAGUCCGAACCGGACUAUUGACCUGAC-5′ | (SEQ ID NO: 654) |
| EGFR-m1526 Target: | 5′-TTCAGGCTTGGCCTGATAACTGGACTG-3′ | (SEQ ID NO: 1010) |
| | 5′-GGCUUGGCCUGAUAACUGGACUGac-3′ | (SEQ ID NO: 299) |
| | 3′-GUCCGAACCGGACUAUUGACCUGACUG-5′ | (SEQ ID NO: 655) |
| EGFR-m1528 Target: | 5′-CAGGCTTGGCCTGATAACTGGACTGAC-3′ | (SEQ ID NO: 1011) |
| | 5′-UUGGCCUGAUAACUGGACUGACCtc-3′ | (SEQ ID NO: 300) |
| | 3′-CGAACCGGACUAUUGACCUGACUGGAG-5′ | (SEQ ID NO: 656) |
| EGFR-m1531 Target: | 5′-GCTTGGCCTGATAACTGGACTGACCTC-3′ | (SEQ ID NO: 1012) |
| | 5′-GCCAACUGUACCUAUGGAUGUGCtg-3′ | (SEQ ID NO: 301) |
| | 3′-UGCGGUUGACAUGGAUACCUACACGAC-5′ | (SEQ ID NO: 657) |
| EGFR-m2168 Target: | 5′-ACGCCAACTGTACCTATGGATGTGCTG-3′ | (SEQ ID NO: 1013) |
| | 5′-CUGGGAUUGUGGGUGGCCUCCUCtt-3′ | (SEQ ID NO: 302) |
| | 3′-GUGACCCUAACACCCACCGGAGGAGAA-5′ | (SEQ ID NO: 658) |
| EGFR-m2253 Target: | 5′-CACTGGGATTGTGGGTGGCCTCCTCTT-3′ | (SEQ ID NO: 1014) |
| | 5′-UGGUGGCCCUUGGGAUUGGCCUAtt-3′ | (SEQ ID NO: 303) |
| | 3′-CCACCACCGGGAACCCUAACCGGAUAA-5′ | (SEQ ID NO: 659) |
| EGFR-m2286 Target: | 5′-GGTGGTGGCCCTTGGGATTGGCCTATT-3′ | (SEQ ID NO: 1015) |
| | 5′-UUGGCCUAUUCAUGCGAAGACGUca-3′ | (SEQ ID NO: 304) |
| | 3′-CUAACCGGAUAAGUACGCUUCUGCAGU-5′ | (SEQ ID NO: 660) |
| EGFR-m2301 Target: | 5′-GATTGGCCTATTCATGCGAAGACGTCA-3′ | (SEQ ID NO: 1016) |
| | 5′-CCGCCUGCUUCAAGAGAGAGAGCtc-3′ | (SEQ ID NO: 305) |
| | 3′-GCGGCGGACGAAGUUCUCUCUCUCGAG-5′ | (SEQ ID NO: 661) |
| EGFR-m2350 Target: | 5′-CGCCGCCTGCTTCAAGAGAGAGAGCTC-3′ | (SEQ ID NO: 1017) |
| | 5′-CGCCUGCUUCAAGAGAGAGAGCUcg-3′ | (SEQ ID NO: 306) |
| | 3′-CGGCGGACGAAGUUCUCUCUCUCGAGC-5′ | (SEQ ID NO: 662) |
| EGFR-m2351 Target: | 5′-GCCGCCTGCTTCAAGAGAGAGAGCTCG-3′ | (SEQ ID NO: 1018) |
| | 5′-GCCUGCUUCAAGAGAGAGAGCUCgt-3′ | (SEQ ID NO: 307) |
| | 3′-GGCGGACGAAGUUCUCUCUCUCGAGCA-5′ | (SEQ ID NO: 663) |
| EGFR-m2352 Target: | 5′-CCGCCTGCTTCAAGAGAGAGAGCTCGT-3′ | (SEQ ID NO: 1019) |
| | 5′-GGACAACCCUCAUGUAUGCCGCCtc-3′ | (SEQ ID NO: 308) |
| | 3′-CACCUGUUGGGAGUACAUACGGCGGAG-5′ | (SEQ ID NO: 664) |
| EGFR-m2617 Target: | 5′-GTGGACAACCCTCATGTATGCCGCCTC-3′ | (SEQ ID NO: 1020) |
| | 5′-UAUGCCGCCUCCUGGGCAUCUGUct-3′ | (SEQ ID NO: 309) |
| | 3′-ACAUACGGCGGAGGACCCGUAGACAGA-5′ | (SEQ ID NO: 665) |
| EGFR-m2631 Target: | 5′-TGTATGCCGCCTCCTGGGCATCTGTCT-3′ | (SEQ ID NO: 1021) |
| | 5′-GCUCAUGCCCUACGGUUGCCUCCtg-3′ | (SEQ ID NO: 310) |
| | 3′-GUCGAGUACGGGAUGCCAACGGAGGAC-5′ | (SEQ ID NO: 666) |
| EGFR-m2683 Target: | 5′-CAGCTCATGCCCTACGGTTGCCTCCTG-3′ | (SEQ ID NO: 1022) |
| | 5′-CUCAUGCCCUACGGUUGCCUCCUgg-3′ | (SEQ ID NO: 311) |
| | 3′-UCGAGUACGGGAUGCCAACGGAGGACC-5′ | (SEQ ID NO: 667) |
| EGFR-m2684 Target: | 5′-AGCTCATGCCCTACGGTTGCCTCCTGG-3′ | (SEQ ID NO: 1023) |
| | 5′-UCGGCGUUUGGUGCACCGUGACUtg-3′ | (SEQ ID NO: 312) |
| | 3′-CUAGCCGCAAACCACGUGGCACUGAAC-5′ | (SEQ ID NO: 668) |
| EGFR-m2800 Target: | 5′-GATCGGCGTTTGGTGCACCGTGACTTG-3′ | (SEQ ID NO: 1024) |
| | 5′-GUUUGGUGCACCGUGACUUGGCAgc-3′ | (SEQ ID NO: 313) |
| | 3′-CGCAAACCACGUGGCACUGAACCGUCG-5′ | (SEQ ID NO: 669) |
| EGFR-m2805 Target: | 5′-GCGTTTGGTGCACCGTGACTTGGCAGC-3′ | (SEQ ID NO: 1025) |
| | 5′-GGGCUGGCCAAACUGCUUGGUGCtg-3′ | (SEQ ID NO: 314) |
| | 3′-AACCCGACCGGUUUGACGAACCACGAC-5′ | (SEQ ID NO: 670) |
| EGFR-m2879 Target: | 5′-TTGGGCTGGCCAAACTGCTTGGTGCTG-3′ | (SEQ ID NO: 1026) |
| | 5′-GGCUGGCCAAACUGCUUGGUGCUga-3′ | (SEQ ID NO: 315) |
| | 3′-ACCCGACCGGUUUGACGAACCACGACU-5′ | (SEQ ID NO: 671) |
| EGFR-m2880 Target: | 5′-TGGGCTGGCCAAACTGCTTGGTGCTGA-3′ | (SEQ ID NO: 1027) |
| | 5′-CUGGCCAAACUGCUUGGUGCUGAag-3′ | (SEQ ID NO: 316) |
| | 3′-CCGACCGGUUUGACGAACCACGACUUC-5′ | (SEQ ID NO: 672) |
| EGFR-m2882 Target: | 5′-GGCTGGCCAAACTGCTTGGTGCTGAAG-3′ | (SEQ ID NO: 1028) |
| | 5′-UGGCCAAACUGCUUGGUGCUGAAga-3′ | (SEQ ID NO: 317) |
| | 3′-CGACCGGUUUGACGAACCACGACUUCU-5′ | (SEQ ID NO: 673) |
| EGFR-m2883 Target: | 5′-GCTGGCCAAACTGCTTGGTGCTGAAGA-3′ | (SEQ ID NO: 1029) |
| | 5′-CAAGUGCUGGAUGAUAGAUGCUGat-3′ | (SEQ ID NO: 318) |
| | 3′-CAGUUCACGACCUACUAUCUACGACUA-5′ | (SEQ ID NO: 674) |
| EGFR-m3154 Target: | 5′-GTCAAGTGCTGGATGATAGATGCTGAT-3′ | (SEQ ID NO: 1030) |
| | 5′-AAGUGCUGGAUGAUAGAUGCUGAta-3′ | (SEQ ID NO: 319) |
| | 3′-AGUUCACGACCUACUAUCUACGACUAU-5′ | (SEQ ID NO: 675) |
| EGFR-m3155 Target: | 5′-TCAAGTGCTGGATGATAGATGCTGATA-3′ | (SEQ ID NO: 1031) |
| | 5′-AGUGCUGGAUGAUAGAUGCUGAUag-3′ | (SEQ ID NO: 320) |
| | 3′-GUUCACGACCUACUAUCUACGACUAUC-5′ | (SEQ ID NO: 676) |
| EGFR-m3156 Target: | 5′-CAAGTGCTGGATGATAGATGCTGATAG-3′ | (SEQ ID NO: 1032) |
| | 5′-GUGCUGGAUGAUAGAUGCUGAUAgc-3′ | (SEQ ID NO: 321) |
| | 3′-UUCACGACCUACUAUCUACGACUAUCG-5′ | (SEQ ID NO: 677) |
| EGFR-m3157 Target: | 5′-AAGTGCTGGATGATAGATGCTGATAGC-3′ | (SEQ ID NO: 1033) |
| | 5′-UGCUGGAUGAUAGAUGCUGAUAGcc-3′ | (SEQ ID NO: 322) |
| | 3′-UCACGACCUACUAUCUACGACUAUCGG-5′ | (SEQ ID NO: 678) |
| EGFR-m3158 Target: | 5′-AGTGCTGGATGATAGATGCTGATAGCC-3′ | (SEQ ID NO: 1034) |
| | 5′-GCUGGAUGAUAGAUGCUGAUAGCcg-3′ | (SEQ ID NO: 323) |
| | 3′-CACGACCUACUAUCUACGACUAUCGGC-5′ | (SEQ ID NO: 679) |
| EGFR-m3159 Target: | 5′-GTGCTGGATGATAGATGCTGATAGCCG-3′ | (SEQ ID NO: 1035) |
| | 5′-CUGGAUGAUAGAUGCUGAUAGCCgc-3′ | (SEQ ID NO: 324) |
| | 3′-ACGACCUACUAUCUACGACUAUCGGCG-5′ | (SEQ ID NO: 680) |
| EGFR-m3160 Target: | 5′-TGCTGGATGATAGATGCTGATAGCCGC-3′ | (SEQ ID NO: 1036) |
| | 5′-UGGAUGAUAGAUGCUGAUAGCCGcc-3′ | (SEQ ID NO: 325) |
| | 3′-CGACCUACUAUCUACGACUAUCGGCGG-5′ | (SEQ ID NO: 681) |
| EGFR-m3161 Target: | 5′-GCTGGATGATAGATGCTGATAGCCGCC-3′ | (SEQ ID NO: 1037) |
| | 5′-GGAUGAUAGAUGCUGAUAGCCGCcc-3′ | (SEQ ID NO: 326) |
| | 3′-GACCUACUAUCUACGACUAUCGGCGGG-5′ | (SEQ ID NO: 682) |
| EGFR-m3162 Target: | 5′-CTGGATGATAGATGCTGATAGCCGCCC-3′ | (SEQ ID NO: 1038) |
| | 5′-GAUGAUAGAUGCUGAUAGCCGCCca-3′ | (SEQ ID NO: 327) |
| | 3′-ACCUACUAUCUACGACUAUCGGCGGGU-5′ | (SEQ ID NO: 683) |
| EGFR-m3163 Target: | 5′-TGGATGATAGATGCTGATAGCCGCCCA-3′ | (SEQ ID NO: 1039) |
| | 5′-GAUAGAUGCUGAUAGCCGCCCAAag-3′ | (SEQ ID NO: 328) |
| | 3′-UACUAUCUACGACUAUCGGCGGGUUUC-5′ | (SEQ ID NO: 684) |
| EGFR-m3166 Target: | 5′-ATGATAGATGCTGATAGCCGCCCAAAG-3′ | (SEQ ID NO: 1040) |
| | 5′-UAGAUGCUGAUAGCCGCCCAAAGtt-3′ | (SEQ ID NO: 329) |
| | 3′-CUAUCUACGACUAUCGGCGGGUUUCAA-5′ | (SEQ ID NO: 685) |
| EGFR-m3168 Target: | 5′-GATAGATGCTGATAGCCGCCCAAAGTT-3′ | (SEQ ID NO: 1041) |
| | 5′-GCUGCCGUGUCAAAGAAGACGCCtt-3′ | (SEQ ID NO: 330) |
| | 3′-CUCGACGGCACAGUUUCUUCUGCGGAA-5′ | (SEQ ID NO: 686) |
| EGFR-m3474 Target: | 5′-GAGCTGCCGTGTCAAAGAAGACGCCTT-3′ | (SEQ ID NO: 1042) |
| | 5′-CUGCCGUGUCAAAGAAGACGCCUtc-3′ | (SEQ ID NO: 331) |
| | 3′-UCGACGGCACAGUUUCUUCUGCGGAAG-5′ | (SEQ ID NO: 687) |
| EGFR-m3475 Target: | 5′-AGCTGCCGTGTCAAAGAAGACGCCTTC-3′ | (SEQ ID NO: 1043) |
| | 5′-GACGCCUUCUUGCAGCGGUACAGct-3′ | (SEQ ID NO: 332) |
| | 3′-UUCUGCGGAAGAACGUCGCCAUGUCGA-5′ | (SEQ ID NO: 688) |
| EGFR-m3491 Target: | 5′-AAGACGCCTTCTTGCAGCGGTACAGCT-3′ | (SEQ ID NO: 1044) |
| | 5′-ACGCCUUCUUGCAGCGGUACAGCtc-3′ | (SEQ ID NO: 333) |
| | 3′-UCUGCGGAAGAACGUCGCCAUGUCGAG-5′ | (SEQ ID NO: 689) |
| EGFR-m3492 Target: | 5′-AGACGCCTTCTTGCAGCGGTACAGCTC-3′ | (SEQ ID NO: 1045) |
| | 5′-CGCCUUCUUGCAGCGGUACAGCUcc-3′ | (SEQ ID NO: 334) |
| | 3′-CUGCGGAAGAACGUCGCCAUGUCGAGG-5′ | (SEQ ID NO: 690) |
| EGFR-m3493 Target: | 5′-GACGCCTTCTTGCAGCGGTACAGCTCC-3′ | (SEQ ID NO: 1046) |
| | 5′-GCCUUCUUGCAGCGGUACAGCUCcg-3′ | (SEQ ID NO: 335) |
| | 3′-UGCGGAAGAACGUCGCCAUGUCGAGGC-5′ | (SEQ ID NO: 691) |
| EGFR-m3494 Target: | 5′-ACGCCTTCTTGCAGCGGTACAGCTCCG-3′ | (SEQ ID NO: 1047) |
| | 5′-CCUUCUUGCAGCGGUACAGCUCCga-3′ | (SEQ ID NO: 336) |
| | 3′-GCGGAAGAACGUCGCCAUGUCGAGGCU-5′ | (SEQ ID NO: 692) |
| EGFR-m3495 Target: | 5′-CGCCTTCTTGCAGCGGTACAGCTCCGA-3′ | (SEQ ID NO: 1048) |
| | 5′-CUUCUUGCAGCGGUACAGCUCCGac-3′ | (SEQ ID NO: 337) |
| | 3′-CGGAAGAACGUCGCCAUGUCGAGGCUG-5′ | (SEQ ID NO: 693) |
| EGFR-m3496 Target: | 5′-GCCTTCTTGCAGCGGTACAGCTCCGAC-3′ | (SEQ ID NO: 1049) |
| | 5′-UUCUUGCAGCGGUACAGCUCCGAcc-3′ | (SEQ ID NO: 338) |
| | 3′-GGAAGAACGUCGCCAUGUCGAGGCUGG-5′ | (SEQ ID NO: 694) |
| EGFR-m3497 Target: | 5′-CCTTCTTGCAGCGGTACAGCTCCGACC-3′ | (SEQ ID NO: 1050) |
| | 5′-CUGGCUUUAAAGCAUAACUCUGAtg-3′ | (SEQ ID NO: 339) |
| | 3′-CUGACCGAAAUUUCGUAUUGAGACUAC-5′ | (SEQ ID NO: 695) |
| EGFR-m4056 Target: | 5′-GACTGGCTTTAAAGCATAACTCTGATG-3′ | (SEQ ID NO: 1051) |
| | 5′-GUGGGCCUCUCUCCUGAUGCACUtt-3′ | (SEQ ID NO: 340) |
| | 3′-UUCACCCGGAGAGAGGACUACGUGAAA-5′ | (SEQ ID NO: 696) |
| EGFR-m4103 Target: | 5′-AAGTGGGCCTCTCTCCTGATGCACTTT-3′ | (SEQ ID NO: 1052) |
| | 5′-UGGGCCUCUCUCCUGAUGCACUUtg-3′ | (SEQ ID NO: 341) |
| | 3′-UCACCCGGAGAGAGGACUACGUGAAAC-5′ | (SEQ ID NO: 697) |
| EGFR-m4104 Target: | 5′-AGTGGGCCTCTCTCCTGATGCACTTTG-3′ | (SEQ ID NO: 1053) |
| | 5′-GGGCCUCUCUCCUGAUGCACUUUgg-3′ | (SEQ ID NO: 342) |
| | 3′-CACCCGGAGAGAGGACUACGUGAAACC-5′ | (SEQ ID NO: 698) |
| EGFR-m4105 Target: | 5′-GTGGGCCTCTCTCCTGATGCACTTTGG-3′ | (SEQ ID NO: 1054) |
| | 5′-GGCCUCUCUCCUGAUGCACUUUGgg-3′ | (SEQ ID NO: 343) |
| | 3′-ACCCGGAGAGAGGACUACGUGAAACCC-5′ | (SEQ ID NO: 699) |
| EGFR-m4106 Target: | 5′-TGGGCCTCTCTCCTGATGCACTTTGGG-3′ | (SEQ ID NO: 1055) |
| | 5′-CUCUCUCCUGAUGCACUUUGGGAag-3′ | (SEQ ID NO: 344) |
| | 3′-CGGAGAGAGGACUACGUGAAACCCUUC-5′ | (SEQ ID NO: 700) |
| EGFR-m4109 Target: | 5′-GCCTCTCTCCTGATGCACTTTGGGAAG-3′ | (SEQ ID NO: 1056) |
| | 5′-UUGAUGCACUCUUGUAGUCUGGUac-3′ | (SEQ ID NO: 345) |
| | 3′-CUAACUACGUGAGAACAUCAGACCAUG-5′ | (SEQ ID NO: 701) |
| EGFR-m4309 Target: | 5′-GATTGATGCACTCTTGTAGTCTGGTAC-3′ | (SEQ ID NO: 1057) |
| | 5′-GACUUCCUUCUAUGUUUUCUGUUtc-3′ | (SEQ ID NO: 346) |
| | 3′-AUCUGAAGGAAGAUACAAAAGACAAAG-5′ | (SEQ ID NO: 702) |
| EGFR-m4619 Target: | 5′-TAGACTTCCTTCTATGTTTTCTGTTTC-3′ | (SEQ ID NO: 1058) |
| | 5′-UCUAUGUUUUCUGUUUCAUUGUUtt-3′ | (SEQ ID NO: 347) |
| | 3′-GAAGAUACAAAAGACAAAGUAACAAAA-5′ | (SEQ ID NO: 703) |
| EGFR-m4627 Target: | 5′-CTTCTATGTTTTCTGTTTCATTGTTTT-3′ | (SEQ ID NO: 1059) |
| | 5′-UGUUUUUCUUCCUGGUAAACUGCag-3′ | (SEQ ID NO: 348) |
| | 3′-AUACAAAAAGAAGGACCAUUUGACGUC-5′ | (SEQ ID NO: 704) |
| EGFR-m5006 Target: | 5′-TATGTTTTTCTTCCTGGTAAACTGCAG-3′ | (SEQ ID NO: 1060) |
| | 5′-GUUUUUCUUCCUGGUAAACUGCAgc-3′ | (SEQ ID NO: 349) |
| | 3′-UACAAAAAGAAGGACCAUUUGACGUCG-5′ | (SEQ ID NO: 705) |
| EGFR-m5007 Target: | 5′-ATGTTTTTCTTCCTGGTAAACTGCAGC-3′ | (SEQ ID NO: 1061) |
| | 5′-UUUUUCUUCCUGGUAAACUGCAGcc-3′ | (SEQ ID NO: 350) |
| | 3′-ACAAAAAGAAGGACCAUUUGACGUCGG-5′ | (SEQ ID NO: 706) |
| EGFR-m5008 Target: | 5′-TGTTTTTCTTCCTGGTAAACTGCAGCC-3′ | (SEQ ID NO: 1062) |
| | 5′-UCUUCCUGGUAAACUGCAGCCAAac-3′ | (SEQ ID NO: 351) |
| | 3′-AAAGAAGGACCAUUUGACGUCGGUUUG-5′ | (SEQ ID NO: 707) |
| EGFR-m5012 Target: | 5′-TTTCTTCCTGGTAAACTGCAGCCAAAC-3′ | (SEQ ID NO: 1063) |
| | 5′-CGAUCUUCCUAAUGCUGUGACCCtt-3′ | (SEQ ID NO: 352) |
| | 3′-AAGCUAGAAGGAUUACGACACUGGGAA-5′ | (SEQ ID NO: 708) |
| EGFR-m5329 Target: | 5′-TTCGATCTTCCTAATGCTGTGACCCTT-3′ | (SEQ ID NO: 1064) |
| | 5′-GAUCUUCCUAAUGCUGUGACCCUtt-3′ | (SEQ ID NO: 353) |
| | 3′-AGCUAGAAGGAUUACGACACUGGGAAA-5′ | (SEQ ID NO: 709) |
| EGFR-m5330 Target: | 5′-TCGATCTTCCTAATGCTGTGACCCTTT-3′ | (SEQ ID NO: 1065) |
| | 5′-GUUGCUACUUCAUAACUGUAAAUtt-3′ | (SEQ ID NO: 354) |
| | 3′-AACAACGAUGAAGUAUUGACAUUUAAA-5′ | (SEQ ID NO: 710) |
| EGFR-m5403 Target: | 5′-TTGTTGCTACTTCATAACTGTAAATTT-3′ | (SEQ ID NO: 1066) |
| | 5′-UUGCAGCAUCCUCUGGUUUCCUAac-3′ | (SEQ ID NO: 355) |
| | 3′-CGAACGUCGUAGGAGACCAAAGGAUUG-5′ | (SEQ ID NO: 711) |
| EGFR-m5638 Target: | 5′-GCTTGCAGCATCCTCTGGTTTCCTAAC-3′ | (SEQ ID NO: 1067) |
| | 5′-UUGCAAGCCACUCUAACUGUAGCaa-3′ | (SEQ ID NO: 356) |
| | 3′-GCAACGUUCGGUGAGAUUGACAUCGUU-5′ | (SEQ ID NO: 712) |
| EGFR-m5895 Target: | 5′-CGTTGCAAGCCACTCTAACTGTAGCAA-3′ | (SEQ ID NO: 1068) |

TABLE 5
Selected Mouse Anti-EGFR DsiRNAs, Unmodified Duplexes (Asymmetrics)

| | | |
|---|---|---|
| | 5′-GCGCAACGCGCAGCAGCCUCCCUCC-3′ | (SEQ ID NO: 1329) |
| | 3′-GUCGCGUUGCGCGUCGUCGGAGGGAGG-5′ | (SEQ ID NO: 617) |
| EGFR-m71 Target: | 5′-CAGCGCAACGCGCAGCAGCCTCCCTCC-3′ | (SEQ ID NO: 973) |
| | 5′-GCGCAGCAGCCUCCCUCCUCUUCUU-3′ | (SEQ ID NO: 1330) |
| | 3′-UGCGCGUCGUCGGAGGGAGGAGAAGAA-5′ | (SEQ ID NO: 618) |
| EGFR-m78 Target: | 5′-ACGCGCAGCAGCCTCCCTCCTCTTCTT-3′ | (SEQ ID NO: 974) |
| | 5′-CCUCCCUCCUCUUCUUCCCGCACUG-3′ | (SEQ ID NO: 1331) |
| | 3′-UCGGAGGGAGGAGAAGAAGGGCGUGAC-5′ | (SEQ ID NO: 619) |
| EGFR-m87 Target: | 5′-AGCCTCCCTCCTCTTCTTCCCGCACTG-3′ | (SEQ ID NO: 975) |
| | 5′-CCCUCCUCUUCUUCCCGCACUGUGC-3′ | (SEQ ID NO: 1332) |
| | 3′-GAGGGAGGAGAAGAAGGGCGUGACACG-5′ | (SEQ ID NO: 620) |
| EGFR-m90 Target: | 5′-CTCCCTCCTCTTCTTCCCGCACTGTGC-3′ | (SEQ ID NO: 976) |
| | 5′-CUCCUCUUCUUCCCGCACUGUGCGC-3′ | (SEQ ID NO: 1333) |
| | 3′-GGGAGGAGAAGAAGGGCGUGACACGCG-5′ | (SEQ ID NO: 621) |
| EGFR-m92 Target: | 5′-CCCTCCTCTTCTTCCCGCACTGTGCGC-3′ | (SEQ ID NO: 977) |
| | 5′-CCUCUUCUUCCCGCACUGUGCGCUC-3′ | (SEQ ID NO: 1334) |
| | 3′-GAGGAGAAGAAGGGCGUGACACGCGAG-5′ | (SEQ ID NO: 622) |
| EGFR-m94 Target: | 5′-CTCCTCTTCTTCCCGCACTGTGCGCTC-3′ | (SEQ ID NO: 978) |
| | 5′-CUUCUUCCCGCACUGUGCGCUCCUC-3′ | (SEQ ID NO: 1335) |
| | 3′-GAGAAGAAGGGCGUGACACGCGAGGAG-5′ | (SEQ ID NO: 623) |
| EGFR-m97 Target: | 5′-CTCTTCTTCCCGCACTGTGCGCTCCTC-3′ | (SEQ ID NO: 979) |
| | 5′-UCUUCCCGCACUGUGCGCUCCUCCU-3′ | (SEQ ID NO: 1336) |
| | 3′-GAAGAAGGGCGUGACACGCGAGGAGGA-5′ | (SEQ ID NO: 624) |
| EGFR-m99 Target: | 5′-CTTCTTCCCGCACTGTGCGCTCCTCCT-3′ | (SEQ ID NO: 980) |
| | 5′-CUUCCCGCACUGUGCGCUCCUCCUG-3′ | (SEQ ID NO: 1337) |
| | 3′-AAGAAGGGCGUGACACGCGAGGAGGAC-5′ | (SEQ ID NO: 625) |
| EGFR-m100 Target: | 5′-TTCTTCCCGCACTGTGCGCTCCTCCTG-3′ | (SEQ ID NO: 981) |
| | 5′-UUCCCGCACUGUGCGCUCCUCCUGG-3′ | (SEQ ID NO: 1338) |
| | 3′-AGAAGGGCGUGACACGCGAGGAGGACC-5′ | (SEQ ID NO: 626) |
| EGFR-m101 Target: | 5′-TCTTCCCGCACTGTGCGCTCCTCCTGG-3′ | (SEQ ID NO: 982) |
| | 5′-GUGCGCUCCUCCUGGGCUAGGGCGU-3′ | (SEQ ID NO: 1339) |
| | 3′-GACACGCGAGGAGGACCCGAUCCCGCA-5′ | (SEQ ID NO: 627) |
| EGFR-m111 Target: | 5′-CTGTGCGCTCCTCCTGGGCTAGGGCGT-3′ | (SEQ ID NO: 983) |
| | 5′-CGCUCCUCCUGGGCUAGGGCGUCUG-3′ | (SEQ ID NO: 1340) |
| | 3′-ACGCGAGGAGGACCCGAUCCCGCAGAC-5′ | (SEQ ID NO: 628) |
| EGFR-m114 Target: | 5′-TGCGCTCCTCCTGGGCTAGGGCGTCTG-3′ | (SEQ ID NO: 984) |
| | 5′-CACUGCUGGUGUUGCUGACCGCGCU-3′ | (SEQ ID NO: 1341) |
| | 3′-GUGUGACGACCACAACGACUGGCGCGA-5′ | (SEQ ID NO: 629) |
| EGFR-m333 Target: | 5′-CACACTGCTGGTGTTGCTGACCGCGCT-3′ | (SEQ ID NO: 985) |
| | 5′-ACUGCUGGUGUUGCUGACCGCGCUC-3′ | (SEQ ID NO: 1342) |
| | 3′-UGUGACGACCACAACGACUGGCGCGAG-5′ | (SEQ ID NO: 630) |
| EGFR-m334 Target: | 5′-ACACTGCTGGTGTTGCTGACCGCGCTC-3′ | (SEQ ID NO: 986) |
| | 5′-CUGCUGGUGUUGCUGACCGCGCUCU-3′ | (SEQ ID NO: 1343) |
| | 3′-GUGACGACCACAACGACUGGCGCGAGA-5′ | (SEQ ID NO: 631) |
| EGFR-m335 Target: | 5′-CACTGCTGGTGTTGCTGACCGCGCTCT-3′ | (SEQ ID NO: 987) |
| | 5′-UGCUGGUGUUGCUGACCGCGCUCUG-3′ | (SEQ ID NO: 1344) |
| | 3′-UGACGACCACAACGACUGGCGCGAGAC-5′ | (SEQ ID NO: 632) |
| EGFR-m336 Target: | 5′-ACTGCTGGTGTTGCTGACCGCGCTCTG-3′ | (SEQ ID NO: 988) |
| | 5′-GCUGGUGUUGCUGACCGCGCUCUGC-3′ | (SEQ ID NO: 1345) |
| | 3′-GACGACCACAACGACUGGCGCGAGACG-5′ | (SEQ ID NO: 633) |
| EGFR-m337 Target: | 5′-CTGCTGGTGTTGCTGACCGCGCTCTGC-3′ | (SEQ ID NO: 989) |
| | 5′-CUGGUGUUGCUGACCGCGCUCUGCG-3′ | (SEQ ID NO: 1346) |
| | 3′-ACGACCACAACGACUGGCGCGAGACGC-5′ | (SEQ ID NO: 634) |
| EGFR-m338 Target: | 5′-TGCTGGTGTTGCTGACCGCGCTCTGCG-3′ | (SEQ ID NO: 990) |
| | 5′-UGGUGUUGCUGACCGCGCUCUGCGC-3′ | (SEQ ID NO: 1347) |
| | 3′-CGACCACAACGACUGGCGCGAGACGCG-5′ | (SEQ ID NO: 635) |
| EGFR-m339 Target: | 5′-GCTGGTGTTGCTGACCGCGCTCTGCGC-3′ | (SEQ ID NO: 991) |
| | 5′-GUGUUGCUGACCGCGCUCUGCGCCG-3′ | (SEQ ID NO: 1348) |
| | 3′-ACCACAACGACUGGCGCGAGACGCGGC-5′ | (SEQ ID NO: 636) |
| EGFR-m341 Target: | 5′-TGGTGTTGCTGACCGCGCTCTGCGCCG-3′ | (SEQ ID NO: 992) |
| | 5′-UGUUGCUGACCGCGCUCUGCGCCGC-3′ | (SEQ ID NO: 1349) |
| | 3′-CCACAACGACUGGCGCGAGACGCGGCG-5′ | (SEQ ID NO: 637) |
| EGFR-m342 Target: | 5′-GGTGTTGCTGACCGCGCTCTGCGCCGC-3′ | (SEQ ID NO: 993) |
| | 5′-GUUGCUGACCGCGCUCUGCGCCGCA-3′ | (SEQ ID NO: 1350) |
| | 3′-CACAACGACUGGCGCGAGACGCGGCGU-5′ | (SEQ ID NO: 638) |
| EGFR-m343 Target: | 5′-GTGTTGCTGACCGCGCTCTGCGCCGCA-3′ | (SEQ ID NO: 994) |
| | 5′-UUGCUGACCGCGCUCUGCGCCGCAG-3′ | (SEQ ID NO: 1351) |
| | 3′-ACAACGACUGGCGCGAGACGCGGCGUC-5′ | (SEQ ID NO: 639) |
| EGFR-m344 Target: | 5′-TGTTGCTGACCGCGCTCTGCGCCGCAG-3′ | (SEQ ID NO: 995) |
| | 5′-CUGACCGCGCUCUGCGCCGCAGGUG-3′ | (SEQ ID NO: 1352) |
| | 3′-ACGACUGGCGCGAGACGCGGCGUCCAC-5′ | (SEQ ID NO: 640) |
| EGFR-m347 Target: | 5′-TGCTGACCGCGCTCTGCGCCGCAGGTG-3′ | (SEQ ID NO: 996) |
| | 5′-UGACCGCGCUCUGCGCCGCAGGUGG-3′ | (SEQ ID NO: 1353) |
| | 3′-CGACUGGCGCGAGACGCGGCGUCCACC-5′ | (SEQ ID NO: 641) |
| EGFR-m348 Target: | 5′-GCTGACCGCGCTCTGCGCCGCAGGTGG-3′ | (SEQ ID NO: 997) |
| | 5′-CUGAUUGGUGCUGUGCGAUUCAGCA-3′ | (SEQ ID NO: 1354) |
| | 3′-AGGACUAACCACGACACGCUAAGUCGU-5′ | (SEQ ID NO: 642) |
| EGFR-m734 Target: | 5′-TCCTGATTGGTGCTGTGCGATTCAGCA-3′ | (SEQ ID NO: 998) |
| | 5′-UGAUUGGUGCUGUGCGAUUCAGCAA-3′ | (SEQ ID NO: 1355) |
| | 3′-GGACUAACCACGACACGCUAAGUCGUU-5′ | (SEQ ID NO: 643) |
| EGFR-m735 Target: | 5′-CCTGATTGGTGCTGTGCGATTCAGCAA-3′ | (SEQ ID NO: 999) |
| | 5′-GAUUGGUGCUGUGCGAUUCAGCAAC-3′ | (SEQ ID NO: 1356) |
| | 3′-GACUAACCACGACACGCUAAGUCGUUG-5′ | (SEQ ID NO: 644) |
| EGFR-m736 Target: | 5′-CTGATTGGTGCTGTGCGATTCAGCAAC-3′ | (SEQ ID NO: 1000) |
| | 5′-UUGGUGCUGUGCGAUUCAGCAACAA-3′ | (SEQ ID NO: 1357) |
| | 3′-CUAACCACGACACGCUAAGUCGUUGUU-5′ | (SEQ ID NO: 645) |
| EGFR-m738 Target: | 5′-GATTGGTGCTGTGCGATTCAGCAACAA-3′ | (SEQ ID NO: 1001) |
| | 5′-GGUGCUGUGCGAUUCAGCAACAACC-3′ | (SEQ ID NO: 1358) |
| | 3′-AACCACGACACGCUAAGUCGUUGUUGG-5′ | (SEQ ID NO: 646) |
| EGFR-m740 Target: | 5′-TTGGTGCTGTGCGATTCAGCAACAACC-3′ | (SEQ ID NO: 1002) |
| | 5′-GUGCUGUGCGAUUCAGCAACAACCC-3′ | (SEQ ID NO: 1359) |
| | 3′-ACCACGACACGCUAAGUCGUUGUUGGG-5′ | (SEQ ID NO: 647) |
| EGFR-m741 Target: | 5′-TGGTGCTGTGCGATTCAGCAACAACCC-3′ | (SEQ ID NO: 1003) |
| | 5′-CAAGCUGUCCCAAUGGAAGCUGCUG-3′ | (SEQ ID NO: 1360) |
| | 3′-AGGUUCGACAGGGUUACCUUCGACGAC-5′ | (SEQ ID NO: 648) |
| EGFR-m879 Target: | 5′-TCCAAGCTGTCCCAATGGAAGCTGCTG-3′ | (SEQ ID NO: 1004) |
| | 5′-GUGCCCAGCAAUGUUCCCAUCGCUG-3′ | (SEQ ID NO: 1361) |
| | 3′-GACACGGGUCGUUACAAGGGUAGCGAC-5′ | (SEQ ID NO: 649) |
| EGFR-m948 Target: | 5′-CTGTGCCCAGCAATGTTCCCATCGCTG-3′ | (SEQ ID NO: 1005) |
| | 5′-AAGUACAGCUUUGGUGCCACCUGUG-3′ | (SEQ ID NO: 1362) |
| | 3′-CCUUCAUGUCGAAACCACGGUGGACAC-5′ | (SEQ ID NO: 650) |
| EGFR-m1154 Target: | 5′-GGAAGTACAGCTTTGGTGCCACCTGTG-3′ | (SEQ ID NO: 1006) |
| | 5′-GUCGCAAAGUUUGUAAUGGCAUAGG-3′ | (SEQ ID NO: 1363) |
| | 3′-GACAGCGUUUCAAACAUUACCGUAUCC-5′ | (SEQ ID NO: 651) |
| EGFR-m1302 Target: | 5′-CTGTCGCAAAGTTTGTAATGGCATAGG-3′ | (SEQ ID NO: 1007) |
| | 5′-GAUUCUUUCACGCGCACUCCUCCUC-3′ | (SEQ ID NO: 1364) |
| | 3′-CCCUAAGAAAGUGCGCGUGAGGAGGAG-5′ | (SEQ ID NO: 652) |
| EGFR-m1439 Target: | 5′-GGGATTCTTTCACGCGCACTCCTCCTC-3′ | (SEQ ID NO: 1008) |
| | 5′-CAGGCUUUUUGCUGAUUCAGGCUUG-3′ | (SEQ ID NO: 1365) |
| | 3′-UUGUCCGAAAAACGACUAAGUCCGAAC-5′ | (SEQ ID NO: 653) |
| EGFR-m1509 Target: | 5′-AACAGGCTTTTTGCTGATTCAGGCTTG-3′ | (SEQ ID NO: 1009) |
| | 5′-CAGGCUUGGCCUGAUAACUGGACUG-3′ | (SEQ ID NO: 1366) |
| | 3′-AAGUCCGAACCGGACUAUUGACCUGAC-5′ | (SEQ ID NO: 654) |
| EGFR-m1526 Target: | 5′-TTCAGGCTTGGCCTGATAACTGGACTG-3′ | (SEQ ID NO: 1010) |
| | 5′-GGCUUGGCCUGAUAACUGGACUGAC-3′ | (SEQ ID NO: 1367) |
| | 3′-GUCCGAACCGGACUAUUGACCUGACUG-5′ | (SEQ ID NO: 655) |
| EGFR-m1528 Target: | 5′-CAGGCTTGGCCTGATAACTGGACTGAC-3′ | (SEQ ID NO: 1011) |
| | 5′-UUGGCCUGAUAACUGGACUGACCUC-3′ | (SEQ ID NO: 1368) |
| | 3′-CGAACCGGACUAUUGACCUGACUGGAG-5′ | (SEQ ID NO: 656) |
| EGFR-m1531 Target: | 5′-GCTTGGCCTGATAACTGGACTGACCTC-3′ | (SEQ ID NO: 1012) |
| | 5′-GCCAACUGUACCUAUGGAUGUGCUG-3′ | (SEQ ID NO: 1369) |
| | 3′-UGCGGUUGACAUGGAUACCUACACGAC-5′ | (SEQ ID NO: 657) |
| EGFR-m2168 Target: | 5′-ACGCCAACTGTACCTATGGATGTGCTG-3′ | (SEQ ID NO: 1013) |
| | 5′-CUGGGAUUGUGGGUGGCCUCCUCUU-3′ | (SEQ ID NO: 1370) |
| | 3′-GUGACCCUAACACCCACCGGAGGAGAA-5′ | (SEQ ID NO: 658) |
| EGFR-m2253 Target: | 5′-CACTGGGATTGTGGGTGGCCTCCTCTT-3′ | (SEQ ID NO: 1014) |
| | 5′-UGGUGGCCCUUGGGAUUGGCCUAUU-3′ | (SEQ ID NO: 1371) |
| | 3′-CCACCACCGGGAACCCUAACCGGAUAA-5′ | (SEQ ID NO: 659) |
| EGFR-m2286 Target: | 5′-GGTGGTGGCCCTTGGGATTGGCCTATT-3′ | (SEQ ID NO: 1015) |
| | 5′-UUGGCCUAUUCAUGCGAAGACGUCA-3′ | (SEQ ID NO: 1372) |
| | 3′-CUAACCGGAUAAGUACGCUUCUGCAGU-5′ | (SEQ ID NO: 660) |
| EGFR-m2301 Target: | 5′-GATTGGCCTATTCATGCGAAGACGTCA-3′ | (SEQ ID NO: 1016) |
| | 5′-CCGCCUGCUUCAAGAGAGAGAGCUC-3′ | (SEQ ID NO: 1373) |
| | 3′-GCGGCGGACGAAGUUCUCUCUCUCGAG-5′ | (SEQ ID NO: 661) |
| EGFR-m2350 Target: | 5′-CGCCGCCTGCTTCAAGAGAGAGAGCTC-3′ | (SEQ ID NO: 1017) |
| | 5′-CGCCUGCUUCAAGAGAGAGAGCUCG-3′ | (SEQ ID NO: 1374) |
| | 3′-CGGCGGACGAAGUUCUCUCUCUCGAGC-5′ | (SEQ ID NO: 662) |
| EGFR-m2351 Target: | 5′-GCCGCCTGCTTCAAGAGAGAGAGCTCG-3′ | (SEQ ID NO: 1018) |
| | 5′-GCCUGCUUCAAGAGAGAGAGCUCGU-3′ | (SEQ ID NO: 1375) |
| | 3′-GGCGGACGAAGUUCUCUCUCUCGAGCA-5′ | (SEQ ID NO: 663) |
| EGFR-m2352 Target: | 5′-CCGCCTGCTTCAAGAGAGAGAGCTCGT-3′ | (SEQ ID NO: 1019) |
| | 5′-GGACAACCCUCAUGUAUGCCGCCUC-3′ | (SEQ ID NO: 1376) |
| | 3′-CACCUGUUGGGAGUACAUACGGCGGAG-5′ | (SEQ ID NO: 664) |
| EGFR-m2617 Target: | 5′-GTGGACAACCCTCATGTATGCCGCCTC-3′ | (SEQ ID NO: 1020) |
| | 5′-UAUGCCGCCUCCUGGGCAUCUGUCU-3′ | (SEQ ID NO: 1377) |
| | 3′-ACAUACGGCGGAGGACCCGUAGACAGA-5′ | (SEQ ID NO: 665) |
| EGFR-m2631 Target: | 5′-TGTATGCCGCCTCCTGGGCATCTGTCT-3′ | (SEQ ID NO: 1021) |
| | 5′-GCUCAUGCCCUACGGUUGCCUCCUG-3′ | (SEQ ID NO: 1378) |
| | 3′-GUCGAGUACGGGAUGCCAACGGAGGAC-5′ | (SEQ ID NO: 666) |
| EGFR-m2683 Target: | 5′-CAGCTCATGCCCTACGGTTGCCTCCTG-3′ | (SEQ ID NO: 1022) |
| | 5′-CUCAUGCCCUACGGUUGCCUCCUGG-3′ | (SEQ ID NO: 1379) |
| | 3′-UCGAGUACGGGAUGCCAACGGAGGACC-5′ | (SEQ ID NO: 667) |
| EGFR-m2684 Target: | 5′-AGCTCATGCCCTACGGTTGCCTCCTGG-3′ | (SEQ ID NO: 1023) |
| | 5′-UCGGCGUUUGGUGCACCGUGACUUG-3′ | (SEQ ID NO: 1380) |
| | 3′-CUAGCCGCAAACCACGUGGCACUGAAC-5′ | (SEQ ID NO: 668) |
| EGFR-m2800 Target: | 5′-GATCGGCGTTTGGTGCACCGTGACTTG-3′ | (SEQ ID NO: 1024) |
| | 5′-GUUUGGUGCACCGUGACUUGGCAGC-3′ | (SEQ ID NO: 1381) |
| | 3′-CGCAAACCACGUGGCACUGAACCGUCG-5′ | (SEQ ID NO: 669) |
| EGFR-m2805 Target: | 5′-GCGTTTGGTGCACCGTGACTTGGCAGC-3′ | (SEQ ID NO: 1025) |
| | 5′-GGGCUGGCCAAACUGCUUGGUGCUG-3′ | (SEQ ID NO: 1382) |
| | 3′-AACCCGACCGGUUUGACGAACCACGAC-5′ | (SEQ ID NO: 670) |
| EGFR-m2879 Target: | 5′-TTGGGCTGGCCAAACTGCTTGGTGCTG-3′ | (SEQ ID NO: 1026) |
| | 5′-GGCUGGCCAAACUGCUUGGUGCUGA-3′ | (SEQ ID NO: 1383) |
| | 3′-ACCCGACCGGUUUGACGAACCACGACU-5′ | (SEQ ID NO: 671) |
| EGFR-m2880 Target: | 5′-TGGGCTGGCCAAACTGCTTGGTGCTGA-3′ | (SEQ ID NO: 1027) |
| | 5′-CUGGCCAAACUGCUUGGUGCUGAAG-3′ | (SEQ ID NO: 1384) |
| | 3′-CCGACCGGUUUGACGAACCACGACUUC-5′ | (SEQ ID NO: 672) |
| EGFR-m2882 Target: | 5′-GGCTGGCCAAACTGCTTGGTGCTGAAG-3′ | (SEQ ID NO: 1028) |
| | 5′-UGGCCAAACUGCUUGGUGCUGAAGA-3′ | (SEQ ID NO: 1385) |
| | 3′-CGACCGGUUUGACGAACCACGACUUCU-5′ | (SEQ ID NO: 673) |
| EGFR-m2883 Target: | 5′-GCTGGCCAAACTGCTTGGTGCTGAAGA-3′ | (SEQ ID NO: 1029) |
| | 5′-CAAGUGCUGGAUGAUAGAUGCUGAU-3′ | (SEQ ID NO: 1386) |
| | 3′-CAGUUCACGACCUACUAUCUACGACUA-5′ | (SEQ ID NO: 674) |
| EGFR-m3154 Target: | 5′-GTCAAGTGCTGGATGATAGATGCTGAT-3′ | (SEQ ID NO: 1030) |
| | 5′-AAGUGCUGGAUGAUAGAUGCUGAUA-3′ | (SEQ ID NO: 1387) |
| | 3′-AGUUCACGACCUACUAUCUACGACUAU-5′ | (SEQ ID NO: 675) |
| EGFR-m3155 Target: | 5′-TCAAGTGCTGGATGATAGATGCTGATA-3′ | (SEQ ID NO: 1031) |
| | 5′-AGUGCUGGAUGAUAGAUGCUGAUAG-3′ | (SEQ ID NO: 1388) |
| | 3′-GUUCACGACCUACUAUCUACGACUAUC-5′ | (SEQ ID NO: 676) |
| EGFR-m3156 Target: | 5′-CAAGTGCTGGATGATAGATGCTGATAG-3′ | (SEQ ID NO: 1032) |
| | 5′-GUGCUGGAUGAUAGAUGCUGAUAGC-3′ | (SEQ ID NO: 1389) |
| | 3′-UUCACGACCUACUAUCUACGACUAUCG-5′ | (SEQ ID NO: 677) |
| EGFR-m3157 Target: | 5′-AAGTGCTGGATGATAGATGCTGATAGC-3′ | (SEQ ID NO: 1033) |
| | 5′-UGCUGGAUGAUAGAUGCUGAUAGCC-3′ | (SEQ ID NO: 1390) |
| | 3′-UCACGACCUACUAUCUACGACUAUCGG-5′ | (SEQ ID NO: 678) |
| EGFR-m3158 Target: | 5′-AGTGCTGGATGATAGATGCTGATAGCC-3′ | (SEQ ID NO: 1034) |
| | 5′-GCUGGAUGAUAGAUGCUGAUAGCCG-3′ | (SEQ ID NO: 1391) |
| | 3′-CACGACCUACUAUCUACGACUAUCGGC-5′ | (SEQ ID NO: 679) |
| EGFR-m3159 Target: | 5′-GTGCTGGATGATAGATGCTGATAGCCG-3′ | (SEQ ID NO: 1035) |
| | 5′-CUGGAUGAUAGAUGCUGAUAGCCGC-3′ | (SEQ ID NO: 1392) |
| | 3′-ACGACCUACUAUCUACGACUAUCGGCG-5′ | (SEQ ID NO: 680) |
| EGFR-m3160 Target: | 5′-TGCTGGATGATAGATGCTGATAGCCGC-3′ | (SEQ ID NO: 1036) |
| | 5′-UGGAUGAUAGAUGCUGAUAGCCGCC-3′ | (SEQ ID NO: 1393) |
| | 3′-CGACCUACUAUCUACGACUAUCGGCGG-5′ | (SEQ ID NO: 681) |
| EGFR-m3161 Target: | 5′-GCTGGATGATAGATGCTGATAGCCGCC-3′ | (SEQ ID NO: 1037) |
| | 5′-GGAUGAUAGAUGCUGAUAGCCGCCC-3′ | (SEQ ID NO: 1394) |
| | 3′-GACCUACUAUCUACGACUAUCGGCGGG-5′ | (SEQ ID NO: 682) |
| EGFR-m3162 Target: | 5′-CTGGATGATAGATGCTGATAGCCGCCC-3′ | (SEQ ID NO: 1038) |
| | 5′-GAUGAUAGAUGCUGAUAGCCGCCCA-3′ | (SEQ ID NO: 1395) |
| | 3′-ACCUACUAUCUACGACUAUCGGCGGGU-5′ | (SEQ ID NO: 683) |
| EGFR-m3163 Target: | 5′-TGGATGATAGATGCTGATAGCCGCCCA-3′ | (SEQ ID NO: 1039) |
| | 5′-GAUAGAUGCUGAUAGCCGCCCAAAG-3′ | (SEQ ID NO: 1396) |
| | 3′-UACUAUCUACGACUAUCGGCGGGUUUC-5′ | (SEQ ID NO: 684) |
| EGFR-m3166 Target: | 5′-ATGATAGATGCTGATAGCCGCCCAAAG-3′ | (SEQ ID NO: 1040) |
| | 5′-UAGAUGCUGAUAGCCGCCCAAAGUU-3′ | (SEQ ID NO: 1397) |
| | 3′-CUAUCUACGACUAUCGGCGGGUUUCAA-5′ | (SEQ ID NO: 685) |
| EGFR-m3168 Target: | 5′-GATAGATGCTGATAGCCGCCCAAAGTT-3′ | (SEQ ID NO: 1041) |
| | 5′-GCUGCCGUGUCAAAGAAGACGCCUU-3′ | (SEQ ID NO: 1398) |
| | 3′-CUCGACGGCACAGUUUCUUCUGCGGAA-5′ | (SEQ ID NO: 686) |
| EGFR-m3474 Target: | 5′-GAGCTGCCGTGTCAAAGAAGACGCCTT-3′ | (SEQ ID NO: 1042) |
| | 5′-CUGCCGUGUCAAAGAAGACGCCUUC-3′ | (SEQ ID NO: 1399) |
| | 3′-UCGACGGCACAGUUUCUUCUGCGGAAG-5′ | (SEQ ID NO: 687) |
| EGFR-m3475 Target: | 5′-AGCTGCCGTGTCAAAGAAGACGCCTTC-3′ | (SEQ ID NO: 1043) |
| | 5′-GACGCCUUCUUGCAGCGGUACAGCU-3′ | (SEQ ID NO: 1400) |
| | 3′-UUCUGCGGAAGAACGUCGCCAUGUCGA-5′ | (SEQ ID NO: 688) |
| EGFR-m3491 Target: | 5′-AAGACGCCTTCTTGCAGCGGTACAGCT-3′ | (SEQ ID NO: 1044) |
| | 5′-ACGCCUUCUUGCAGCGGUACAGCUC-3′ | (SEQ ID NO: 1401) |
| | 3′-UCUGCGGAAGAACGUCGCCAUGUCGAG-5′ | (SEQ ID NO: 689) |
| EGFR-m3492 Target: | 5′-AGACGCCTTCTTGCAGCGGTACAGCTC-3′ | (SEQ ID NO: 1045) |
| | 5′-CGCCUUCUUGCAGCGGUACAGCUCC-3′ | (SEQ ID NO: 1402) |
| | 3′-CUGCGGAAGAACGUCGCCAUGUCGAGG-5′ | (SEQ ID NO: 690) |
| EGFR-m3493 Target: | 5′-GACGCCTTCTTGCAGCGGTACAGCTCC-3′ | (SEQ ID NO: 1046) |
| | 5′-GCCUUCUUGCAGCGGUACAGCUCCG-3′ | (SEQ ID NO: 1403) |
| | 3′-UGCGGAAGAACGUCGCCAUGUCGAGGC-5′ | (SEQ ID NO: 691) |
| EGFR-m3494 Target: | 5′-ACGCCTTCTTGCAGCGGTACAGCTCCG-3′ | (SEQ ID NO: 1047) |
| | 5′-CCUUCUUGCAGCGGUACAGCUCCGA-3′ | (SEQ ID NO: 1404) |
| | 3′-GCGGAAGAACGUCGCCAUGUCGAGGCU-5′ | (SEQ ID NO: 692) |
| EGFR-m3495 Target: | 5′-CGCCTTCTTGCAGCGGTACAGCTCCGA-3′ | (SEQ ID NO: 1048) |
| | 5′-CUUCUUGCAGCGGUACAGCUCCGAC-3′ | (SEQ ID NO: 1405) |
| | 3′-CGGAAGAACGUCGCCAUGUCGAGGCUG-5′ | (SEQ ID NO: 693) |
| EGFR-m3496 Target: | 5′-GCCTTCTTGCAGCGGTACAGCTCCGAC-3′ | (SEQ ID NO: 1049) |
| | 5′-UUCUUGCAGCGGUACAGCUCCGACC-3′ | (SEQ ID NO: 1406) |
| | 3′-GGAAGAACGUCGCCAUGUCGAGGCUGG-5′ | (SEQ ID NO: 694) |
| EGFR-m3497 Target: | 5′-CCTTCTTGCAGCGGTACAGCTCCGACC-3′ | (SEQ ID NO: 1050) |
| | 5′-CUGGCUUUAAAGCAUAACUCUGAUG-3′ | (SEQ ID NO: 1407) |
| | 3′-CUGACCGAAAUUUCGUAUUGAGACUAC-5′ | (SEQ ID NO: 695) |
| EGFR-m4056 Target: | 5′-GACTGGCTTTAAAGCATAACTCTGATG-3′ | (SEQ ID NO: 1051) |
| | 5′-GUGGGCCUCUCUCCUGAUGCACUUU-3′ | (SEQ ID NO: 1408) |
| | 3′-UUCACCCGGAGAGAGGACUACGUGAAA-5′ | (SEQ ID NO: 696) |
| EGFR-m4103 Target: | 5′-AAGTGGGCCTCTCTCCTGATGCACTTT-3′ | (SEQ ID NO: 1052) |
| | 5′-UGGGCCUCUCUCCUGAUGCACUUUG-3′ | (SEQ ID NO: 1409) |
| | 3′-UCACCCGGAGAGAGGACUACGUGAAAC-5′ | (SEQ ID NO: 697) |
| EGFR-m4104 Target: | 5′-AGTGGGCCTCTCTCCTGATGCACTTTG-3′ | (SEQ ID NO: 1053) |
| | 5′-GGGCCUCUCUCCUGAUGCACUUUGG-3′ | (SEQ ID NO: 1410) |
| | 3′-CACCCGGAGAGAGGACUACGUGAAACC-5′ | (SEQ ID NO: 698) |
| EGFR-m4105 Target: | 5′-GTGGGCCTCTCTCCTGATGCACTTTGG-3′ | (SEQ ID NO: 1054) |
| | 5′-GGCCUCUCUCCUGAUGCACUUUGGG-3′ | (SEQ ID NO: 1411) |
| | 3′-ACCCGGAGAGAGGACUACGUGAAACCC-5′ | (SEQ ID NO: 699) |
| EGFR-m4106 Target: | 5′-TGGGCCTCTCTCCTGATGCACTTTGGG-3′ | (SEQ ID NO: 1055) |
| | 5′-CUCUCUCCUGAUGCACUUUGGGAAG-3′ | (SEQ ID NO: 1412) |
| | 3′-CGGAGAGAGGACUACGUGAAACCCUUC-5′ | (SEQ ID NO: 700) |
| EGFR-m4109 Target: | 5′-GCCTCTCTCCTGATGCACTTTGGGAAG-3′ | (SEQ ID NO: 1056) |
| | 5′-UUGAUGCACUCUUGUAGUCUGGUAC-3′ | (SEQ ID NO: 1413) |
| | 3′-CUAACUACGUGAGAACAUCAGACCAUG-5′ | (SEQ ID NO: 701) |
| EGFR-m4309 Target: | 5′-GATTGATGCACTCTTGTAGTCTGGTAC-3′ | (SEQ ID NO: 1057) |
| | 5′-GACUUCCUUCUAUGUUUUCUGUUUC-3′ | (SEQ ID NO: 1414) |
| | 3′-AUCUGAAGGAAGAUACAAAAGACAAAG-5′ | (SEQ ID NO: 702) |
| EGFR-m4619 Target: | 5′-TAGACTTCCTTCTATGTTTTCTGTTTC-3′ | (SEQ ID NO: 1058) |
| | 5′-UCUAUGUUUUCUGUUUCAUUGUUUU-3′ | (SEQ ID NO: 1415) |
| | 3′-GAAGAUACAAAAGACAAAGUAACAAAA-5′ | (SEQ ID NO: 703) |
| EGFR-m4627 Target: | 5′-CTTCTATGTTTTCTGTTTCATTGTTTT-3′ | (SEQ ID NO: 1059) |
| | 5′-UGUUUUUCUUCCUGGUAAACUGCAG-3′ | (SEQ ID NO: 1416) |
| | 3′-AUACAAAAAGAAGGACCAUUUGACGUC-5′ | (SEQ ID NO: 704) |
| EGFR-m5006 Target: | 5′-TATGTTTTTCTTCCTGGTAAACTGCAG-3′ | (SEQ ID NO: 1060) |
| | 5′-GUUUUUCUUCCUGGUAAACUGCAGC-3′ | (SEQ ID NO: 1417) |
| | 3′-UACAAAAAGAAGGACCAUUUGACGUCG-5′ | (SEQ ID NO: 705) |
| EGFR-m5007 Target: | 5′-ATGTTTTTCTTCCTGGTAAACTGCAGC-3′ | (SEQ ID NO: 1061) |
| | 5′-UUUUUCUUCCUGGUAAACUGCAGCC-3′ | (SEQ ID NO: 1418) |
| | 3′-ACAAAAAGAAGGACCAUUUGACGUCGG-5′ | (SEQ ID NO: 706) |
| EGFR-m5008 Target: | 5′-TGTTTTTCTTCCTGGTAAACTGCAGCC-3′ | (SEQ ID NO: 1062) |
| | 5′-UCUUCCUGGUAAACUGCAGCCAAAC-3′ | (SEQ ID NO: 1419) |
| | 3′-AAAGAAGGACCAUUUGACGUCGGUUUG-5′ | (SEQ ID NO: 707) |
| EGFR-m5012 Target: | 5′-TTTCTTCCTGGTAAACTGCAGCCAAAC-3′ | (SEQ ID NO: 1063) |
| | 5′-CGAUCUUCCUAAUGCUGUGACCCUU-3′ | (SEQ ID NO: 1420) |
| | 3′-AAGCUAGAAGGAUUACGACACUGGGAA-5′ | (SEQ ID NO: 708) |
| EGFR-m5329 Target: | 5′-TTCGATCTTCCTAATGCTGTGACCCTT-3′ | (SEQ ID NO: 1064) |
| | 5′-GAUCUUCCUAAUGCUGUGACCCUUU-3′ | (SEQ ID NO: 1421) |
| | 3′-AGCUAGAAGGAUUACGACACUGGGAAA-5′ | (SEQ ID NO: 709) |
| EGFR-m5330 Target: | 5′-TCGATCTTCCTAATGCTGTGACCCTTT-3′ | (SEQ ID NO: 1065) |
| | 5′-GUUGCUACUUCAUAACUGUAAAUUU-3′ | (SEQ ID NO: 1422) |
| | 3′-AACAACGAUGAAGUAUUGACAUUUAAA-5′ | (SEQ ID NO: 710) |
| EGFR-m5403 Target: | 5′-TTGTTGCTACTTCATAACTGTAAATTT-3′ | (SEQ ID NO: 1066) |
| | 5′-UUGCAGCAUCCUCUGGUUUCCUAAC-3′ | (SEQ ID NO: 1423) |
| | 3′-CGAACGUCGUAGGAGACCAAAGGAUUG-5′ | (SEQ ID NO: 711) |
| EGFR-m5638 Target: | 5′-GCTTGCAGCATCCTCTGGTTTCCTAAC-3′ | (SEQ ID NO: 1067) |
| | 5′-UUGCAAGCCACUCUAACUGUAGCAA-3′ | (SEQ ID NO: 1424) |
| | 3′-GCAACGUUCGGUGAGAUUGACAUCGUU-5′ | (SEQ ID NO: 712) |
| EGFR-m5895 Target: | 5′-CGTTGCAAGCCACTCTAACTGTAGCAA-3′ | (SEQ ID NO: 1068) |

[0251] Projected 21 nucleotide and component 19 nucleotide target sequences for DsiRNA of Tables 2-5 above and of Tables 7-10 below are presented in Table 6.

TABLE 6
DsiRNA Target Sequences (21mers) In EGFR

| | | |
|---|---|---|
| EGFR-31 21 nt Target: | 5′-GGCGCAGCGCGGCCGCAGCAG-3′ | (SEQ ID NO: 1425) |
| EGFR-32 21 nt Target: | 5′-GCGCAGCGCGGCCGCAGCAGC-3′ | (SEQ ID NO: 1426) |
| EGFR-34 21 nt Target: | 5′-GCAGCGCGGCCGCAGCAGCCT-3′ | (SEQ ID NO: 1427) |
| EGFR-298 21 nt Target: | 5′-CAGCGCTCCTGGCGCTGCTGG-3′ | (SEQ ID NO: 1428) |
| EGFR-300 21 nt Target: | 5′-GCGCTCCTGGCGCTGCTGGCT-3′ | (SEQ ID NO: 1429) |
| EGFR-302 21 nt Target: | 5′-GCTCCTGGCGCTGCTGGCTGC-3′ | (SEQ ID NO: 1430) |
| EGFR-390 21 nt Target: | 5′-CAGTTGGGCACTTTTGAAGAT-3′ | (SEQ ID NO: 1431) |
| EGFR-458 21 nt Target: | 5′-TGGGAATTTGGAAATTACCTA-3′ | (SEQ ID NO: 1432) |
| EGFR-489 21 nt Target: | 5′-AATTATGATCTTTCCTTCTTA-3′ | (SEQ ID NO: 1433) |
| EGFR-525 21 nt Target: | 5′-GTGGCTGGTTATGTCCTCATT-3′ | (SEQ ID NO: 1434) |
| EGFR-676 21 nt Target: | 5′-TGCCCATGAGAAATTTACAGG-3′ | (SEQ ID NO: 1435) |
| EGFR-701 21 nt Target: | 5′-CCTGCATGGCGCCGTGCGGTT-3′ | (SEQ ID NO: 1436) |
| EGFR-707 21 nt Target: | 5′-TGGCGCCGTGCGGTTCAGCAA-3′ | (SEQ ID NO: 1437) |
| EGFR-707 21 nt Target: | 5′-TGGCGCCGTGCGGTTCAGCAA-3′ | (SEQ ID NO: 1438) |
| EGFR-709 21 nt Target: | 5′-GCGCCGTGCGGTTCAGCAACA-3′ | (SEQ ID NO: 1439) |
| EGFR-710 21 nt Target: | 5′-CGCCGTGCGGTTCAGCAACAA-3′ | (SEQ ID NO: 1440) |
| EGFR-827 21 nt Target: | 5′-CAGCTGCCAAAAGTGTGATCC-3′ | (SEQ ID NO: 1441) |
| EGFR-912 21 nt Target: | 5′-ATCTGTGCCCAGCAGTGCTCC-3′ | (SEQ ID NO: 1442) |
| EGFR-914 21 nt Target: | 5′-CTGTGCCCAGCAGTGCTCCGG-3′ | (SEQ ID NO: 1443) |
| EGFR-926 21 nt Target: | 5′-GTGCTCCGGGCGCTGCCGTGG-3′ | (SEQ ID NO: 1444) |
| EGFR-1005 21 nt Target: | 5′-GAGAGCGACTGCCTGGTCTGC-3′ | (SEQ ID NO: 1445) |
| EGFR-1013 21 nt Target: | 5′-CTGCCTGGTCTGCCGCAAATT-3′ | (SEQ ID NO: 1446) |
| EGFR-1175 21 nt Target: | 5′-GACAGATCACGGCTCGTGCGT-3′ | (SEQ ID NO: 1447) |
| EGFR-1271 21 nt Target: | 5′-CCGCAAAGTGTGTAACGGAAT-3′ | (SEQ ID NO: 1448) |
| EGFR-1286 21 nt Target: | 5′-CGGAATAGGTATTGGTGAATT-3′ | (SEQ ID NO: 1449) |
| EGFR-1330 21 nt Target: | 5′-CTACGAATATTAAACACTTCA-3′ | (SEQ ID NO: 1450) |
| EGFR-1437 21 nt Target: | 5′-CCACAGGAACTGGATATTCTG-3′ | (SEQ ID NO: 1451) |
| EGFR-1475 21 nt Target: | 5′-CACAGGGTTTTTGCTGATTCA-3′ | (SEQ ID NO: 1452) |
| EGFR-1661 21 nt Target: | 5′-TTCAGGAAACAAAAATTTGTG-3′ | (SEQ ID NO: 1453) |
| EGFR-1679 21 nt Target: | 5′-GTGCTATGCAAATACAATAAA-3′ | (SEQ ID NO: 1454) |
| EGFR-1723 21 nt Target: | 5′-CCGGTCAGAAAACCAAAATTA-3′ | (SEQ ID NO: 1455) |
| EGFR-1838 21 nt Target: | 5′-CTGCGTCTCTTGCCGGAATGT-3′ | (SEQ ID NO: 1456) |
| EGFR-2227 21 nt Target: | 5′-GGGCCCTCCTCTTGCTGCTGG-3′ | (SEQ ID NO: 1457) |
| EGFR-2228 21 nt Target: | 5′-GGCCCTCCTCTTGCTGCTGGT-3′ | (SEQ ID NO: 1458) |
| EGFR-2232 21 nt Target: | 5′-CTCCTCTTGCTGCTGGTGGTG-3′ | (SEQ ID NO: 1459) |
| EGFR-2233 21 nt Target: | 5′-TCCTCTTGCTGCTGGTGGTGG-3′ | (SEQ ID NO: 1460) |
| EGFR-2295 21 nt Target: | 5′-CGGAAGCGCACGCTGCGGAGG-3′ | (SEQ ID NO: 1461) |
| EGFR-2298 21 nt Target: | 5′-AAGCGCACGCTGCGGAGGCTG-3′ | (SEQ ID NO: 1462) |
| EGFR-2399 21 nt Target: | 5′-AACTGAATTCAAAAAGATCAA-3′ | (SEQ ID NO: 1463) |
| EGFR-2417 21 nt Target: | 5′-CAAAGTGCTGGGCTCCGGTGC-3′ | (SEQ ID NO: 1464) |
| EGFR-2419 21 nt Target: | 5′-AAGTGCTGGGCTCCGGTGCGT-3′ | (SEQ ID NO: 1465) |
| EGFR-2420 21 nt Target: | 5′-AGTGCTGGGCTCCGGTGCGTT-3′ | (SEQ ID NO: 1466) |
| EGFR-2421 21 nt Target: | 5′-GTGCTGGGCTCCGGTGCGTTC-3′ | (SEQ ID NO: 1467) |
| EGFR-2422 21 nt Target: | 5′-TGCTGGGCTCCGGTGCGTTCG-3′ | (SEQ ID NO: 1468) |
| EGFR-2591 21 nt Target: | 5′-CGTGTGCCGCCTGCTGGGCAT-3′ | (SEQ ID NO: 1469) |
| EGFR-2592 21 nt Target: | 5′-GTGTGCCGCCTGCTGGGCATC-3′ | (SEQ ID NO: 1470) |
| EGFR-2594 21 nt Target: | 5′-GTGCCGCCTGCTGGGCATCTG-3′ | (SEQ ID NO: 1471) |
| EGFR-2624 21 nt Target: | 5′-CACCGTGCAGCTCATCACGCA-3′ | (SEQ ID NO: 1472) |
| EGFR-2627 21 nt Target: | 5′-CGTGCAGCTCATCACGCAGCT-3′ | (SEQ ID NO: 1473) |
| EGFR-2631 21 nt Target: | 5′-CAGCTCATCACGCAGCTCATG-3′ | (SEQ ID NO: 1474) |
| EGFR-2632 21 nt Target: | 5′-AGCTCATCACGCAGCTCATGC-3′ | (SEQ ID NO: 1475) |
| EGFR-2643 21 nt Target: | 5′-CAGCTCATGCCCTTCGGCTGC-3′ | (SEQ ID NO: 1476) |
| EGFR-2644 21 nt Target: | 5′-AGCTCATGCCCTTCGGCTGCC-3′ | (SEQ ID NO: 1477) |
| EGFR-2754 21 nt Target: | 5′-TTGGAGGACCGTCGCTTGGTG-3′ | (SEQ ID NO: 1478) |
| EGFR-2756 21 nt Target: | 5′-GGAGGACCGTCGCTTGGTGCA-3′ | (SEQ ID NO: 1479) |
| EGFR-2757 21 nt Target: | 5′-GAGGACCGTCGCTTGGTGCAC-3′ | (SEQ ID NO: 1480) |
| EGFR-2758 21 nt Target: | 5′-AGGACCGTCGCTTGGTGCACC-3′ | (SEQ ID NO: 1481) |
| EGFR-2760 21 nt Target: | 5′-GACCGTCGCTTGGTGCACCGC-3′ | (SEQ ID NO: 1482) |
| EGFR-2762 21 nt Target: | 5′-CCGTCGCTTGGTGCACCGCGA-3′ | (SEQ ID NO: 1483) |
| EGFR-2764 21 nt Target: | 5′-GTCGCTTGGTGCACCGCGACC-3′ | (SEQ ID NO: 1484) |
| EGFR-2765 21 nt Target: | 5′-TCGCTTGGTGCACCGCGACCT-3′ | (SEQ ID NO: 1485) |
| EGFR-2767 21 nt Target: | 5′-GCTTGGTGCACCGCGACCTGG-3′ | (SEQ ID NO: 1486) |
| EGFR-2915 21 nt Target: | 5′-GGCATTGGAATCAATTTTACA-3′ | (SEQ ID NO: 1487) |
| EGFR-3115 21 nt Target: | 5′-TCAAGTGCTGGATGATAGACG-3′ | (SEQ ID NO: 1488) |
| EGFR-3117 21 nt Target: | 5′-AAGTGCTGGATGATAGACGCA-3′ | (SEQ ID NO: 1489) |
| EGFR-3118 21 nt Target: | 5′-AGTGCTGGATGATAGACGCAG-3′ | (SEQ ID NO: 1490) |
| EGFR-3120 21 nt Target: | 5′-TGCTGGATGATAGACGCAGAT-3′ | (SEQ ID NO: 1491) |
| EGFR-3372 21 nt Target: | 5′-CTCCTGAGCTCTCTGAGTGCA-3′ | (SEQ ID NO: 1492) |
| EGFR-3375 21 nt Target: | 5′-CTGAGCTCTCTGAGTGCAACC-3′ | (SEQ ID NO: 1493) |
| EGFR-3440 21 nt Target: | 5′-AAGCTGTCCCATCAAGGAAGA-3′ | (SEQ ID NO: 1494) |
| EGFR-3441 21 nt Target: | 5′-AGCTGTCCCATCAAGGAAGAC-3′ | (SEQ ID NO: 1495) |
| EGFR-3457 21 nt Target: | 5′-AAGACAGCTTCTTGCAGCGAT-3′ | (SEQ ID NO: 1496) |
| EGFR-3458 21 nt Target: | 5′-AGACAGCTTCTTGCAGCGATA-3′ | (SEQ ID NO: 1497) |
| EGFR-3459 21 nt Target: | 5′-GACAGCTTCTTGCAGCGATAC-3′ | (SEQ ID NO: 1498) |
| EGFR-3460 21 nt Target: | 5′-ACAGCTTCTTGCAGCGATACA-3′ | (SEQ ID NO: 1499) |
| EGFR-3461 21 nt Target: | 5′-CAGCTTCTTGCAGCGATACAG-3′ | (SEQ ID NO: 1500) |
| EGFR-3463 21 nt Target: | 5′-GCTTCTTGCAGCGATACAGCT-3′ | (SEQ ID NO: 1501) |
| EGFR-3876 21 nt Target: | 5′-CCACAAAGCAGTGAATTTATT-3′ | (SEQ ID NO: 1502) |
| EGFR-4178 21 nt Target: | 5′-GTATATTTGAAAAAAAAAAAA-3′ | (SEQ ID NO: 1503) |
| EGFR-4205 21 nt Target: | 5′-TGTGAGGATTTTTATTGATTG-3′ | (SEQ ID NO: 1504) |
| EGFR-4249 21 nt Target: | 5′-CGCTATTGATTTTTACTTCAA-3′ | (SEQ ID NO: 1505) |
| EGFR-4284 21 nt Target: | 5′-AAGGAAGAAGCTTGCTGGTAG-3′ | (SEQ ID NO: 1506) |
| EGFR-4285 21 nt Target: | 5′-AGGAAGAAGCTTGCTGGTAGC-3′ | (SEQ ID NO: 1507) |
| EGFR-4286 21 nt Target: | 5′-GGAAGAAGCTTGCTGGTAGCA-3′ | (SEQ ID NO: 1508) |
| EGFR-4287 21 nt Target: | 5′-GAAGAAGCTTGCTGGTAGCAC-3′ | (SEQ ID NO: 1509) |
| EGFR-4288 21 nt Target: | 5′-AAGAAGCTTGCTGGTAGCACT-3′ | (SEQ ID NO: 1510) |
| EGFR-4290 21 nt Target: | 5′-GAAGCTTGCTGGTAGCACTTG-3′ | (SEQ ID NO: 1511) |
| EGFR-4291 21 nt Target: | 5′-AAGCTTGCTGGTAGCACTTGC-3′ | (SEQ ID NO: 1512) |
| EGFR-4292 21 nt Target: | 5′-AGCTTGCTGGTAGCACTTGCT-3′ | (SEQ ID NO: 1513) |
| EGFR-4293 21 nt Target: | 5′-GCTTGCTGGTAGCACTTGCTA-3′ | (SEQ ID NO: 1514) |
| EGFR-4294 21 nt Target: | 5′-CTTGCTGGTAGCACTTGCTAC-3′ | (SEQ ID NO: 1515) |
| EGFR-4295 21 nt Target: | 5′-TTGCTGGTAGCACTTGCTACC-3′ | (SEQ ID NO: 1516) |
| EGFR-4372 21 nt Target: | 5′-GGATGCTTGATTCCAGTGGTT-3′ | (SEQ ID NO: 1517) |
| EGFR-4373 21 nt Target: | 5′-GATGCTTGATTCCAGTGGTTC-3′ | (SEQ ID NO: 1518) |
| EGFR-4450 21 nt Target: | 5′-AGCAGGCCGGATCGGTACTGT-3′ | (SEQ ID NO: 1519) |
| EGFR-4455 21 nt Target: | 5′-GCCGGATCGGTACTGTATCAA-3′ | (SEQ ID NO: 1520) |
| EGFR-4550 21 nt Target: | 5′-TCCTTAGACTTACTTTTGTAA-3′ | (SEQ ID NO: 1521) |
| EGFR-4684 21 nt Target: | 5′-CTGTCTTGCTGTCATGAAATC-3′ | (SEQ ID NO: 1522) |
| EGFR-4804 21 nt Target: | 5′-CCTAAGGATAGCACCGCTTTT-3′ | (SEQ ID NO: 1523) |
| EGFR-4806 21 nt Target: | 5′-TAAGGATAGCACCGCTTTTGT-3′ | (SEQ ID NO: 1524) |
| EGFR-4807 21 nt Target: | 5′-AAGGATAGCACCGCTTTTGTT-3′ | (SEQ ID NO: 1525) |
| EGFR-4808 21 nt Target: | 5′-AGGATAGCACCGCTTTTGTTC-3′ | (SEQ ID NO: 1526) |
| EGFR-4809 21 nt Target: | 5′-GGATAGCACCGCTTTTGTTCT-3′ | (SEQ ID NO: 1527) |
| EGFR-4810 21 nt Target: | 5′-GATAGCACCGCTTTTGTTCTC-3′ | (SEQ ID NO: 1528) |
| EGFR-4811 21 nt Target: | 5′-ATAGCACCGCTTTTGTTCTCG-3′ | (SEQ ID NO: 1529) |
| EGFR-4812 21 nt Target: | 5′-TAGCACCGCTTTTGTTCTCGC-3′ | (SEQ ID NO: 1530) |
| EGFR-4813 21 nt Target: | 5′-AGCACCGCTTTTGTTCTCGCA-3′ | (SEQ ID NO: 1531) |
| EGFR-4816 21 nt Target: | 5′-ACCGCTTTTGTTCTCGCAAAA-3′ | (SEQ ID NO: 1532) |
| EGFR-4817 21 nt Target: | 5′-CCGCTTTTGTTCTCGCAAAAA-3′ | (SEQ ID NO: 1533) |
| EGFR-4818 21 nt Target: | 5′-CGCTTTTGTTCTCGCAAAAAC-3′ | (SEQ ID NO: 1534) |
| EGFR-4819 21 nt Target: | 5′-GCTTTTGTTCTCGCAAAAACG-3′ | (SEQ ID NO: 1535) |
| EGFR-4824 21 nt Target: | 5′-TGTTCTCGCAAAAACGTATCT-3′ | (SEQ ID NO: 1536) |
| EGFR-4953 21 nt Target: | 5′-CAAAATTAGTTTGTGTTACTT-3′ | (SEQ ID NO: 1537) |
| EGFR-4970 21 nt Target: | 5′-ACTTATGGAAGATAGTTTTCT-3′ | (SEQ ID NO: 1538) |
| EGFR-5003 21 nt Target: | 5′-CTTCAAAAGCTTTTTACTCAA-3′ | (SEQ ID NO: 1539) |
| EGFR-5206 21 nt Target: | 5′-AAACTAGGGTTTGAAATTGAT-3′ | (SEQ ID NO: 1540) |
| EGFR-5275 21 nt Target: | 5′-CCTAAAATAATTTCTCTACAA-3′ | (SEQ ID NO: 1541) |
| EGFR-5374 21 nt Target: | 5′-AACAGCAGTCCTTTGTAAACA-3′ | (SEQ ID NO: 1542) |
| EGFR-5429 21 nt Target: | 5′-TCCAATTTATCAAGGAAGAAA-3′ | (SEQ ID NO: 1543) |
| EGFR-5497 21 nt Target: | 5′-CATACAAAATGTTCCTTTTGC-3′ | (SEQ ID NO: 1544) |
| EGFR-5505 21 nt Target: | 5′-ATGTTCCTTTTGCTTTTAAAG-3′ | (SEQ ID NO: 1545) |
| EGFR-5506 21 nt Target: | 5′-TGTTCCTTTTGCTTTTAAAGT-3′ | (SEQ ID NO: 1546) |
| EGFR-5512 21 nt Target: | 5′-TTTTGCTTTTAAAGTAATTTT-3′ | (SEQ ID NO: 1547) |
| EGFR-5565 21 nt Target: | 5′-TTGTTAAGAAAGTATTTGATT-3′ | (SEQ ID NO: 1548) |
| EGFR-463 21 nt Target: | 5′-ATTTGGAAATTACCTATGTGC-3′ | (SEQ ID NO: 1549) |
| EGFR-464 21 nt Target: | 5′-TTTGGAAATTACCTATGTGCA-3′ | (SEQ ID NO: 1550) |
| EGFR-496 21 nt Target: | 5′-ATCTTTCCTTCTTAAAGACCA-3′ | (SEQ ID NO: 1551) |
| EGFR-497 21 nt Target: | 5′-TCTTTCCTTCTTAAAGACCAT-3′ | (SEQ ID NO: 1552) |
| EGFR-498 21 nt Target: | 5′-CTTTCCTTCTTAAAGACCATC-3′ | (SEQ ID NO: 1553) |
| EGFR-499 21 nt Target: | 5′-TTTCCTTCTTAAAGACCATCC-3′ | (SEQ ID NO: 1554) |
| EGFR-500 21 nt Target: | 5′-TTCCTTCTTAAAGACCATCCA-3′ | (SEQ ID NO: 1555) |
| EGFR-501 21 nt Target: | 5′-TCCTTCTTAAAGACCATCCAG-3′ | (SEQ ID NO: 1556) |
| EGFR-502 21 nt Target: | 5′-CCTTCTTAAAGACCATCCAGG-3′ | (SEQ ID NO: 1557) |
| EGFR-503 21 nt Target: | 5′-CTTCTTAAAGACCATCCAGGA-3′ | (SEQ ID NO: 1558) |
| EGFR-504 21 nt Target: | 5′-TTCTTAAAGACCATCCAGGAG-3′ | (SEQ ID NO: 1559) |
| EGFR-505 21 nt Target: | 5′-TCTTAAAGACCATCCAGGAGG-3′ | (SEQ ID NO: 1560) |
| EGFR-506 21 nt Target: | 5′-CTTAAAGACCATCCAGGAGGT-3′ | (SEQ ID NO: 1561) |
| EGFR-507 21 nt Target: | 5′-TTAAAGACCATCCAGGAGGTG-3′ | (SEQ ID NO: 1562) |
| EGFR-508 21 nt Target: | 5′-TAAAGACCATCCAGGAGGTGG-3′ | (SEQ ID NO: 1563) |
| EGFR-509 21 nt Target: | 5′-AAAGACCATCCAGGAGGTGGC-3′ | (SEQ ID NO: 1564) |
| EGFR-838 21 nt Target: | 5′-AGTGTGATCCAAGCTGTCCCA-3′ | (SEQ ID NO: 1565) |
| EGFR-839 21 nt Target: | 5′-GTGTGATCCAAGCTGTCCCAA-3′ | (SEQ ID NO: 1566) |
| EGFR-840 21 nt Target: | 5′-TGTGATCCAAGCTGTCCCAAT-3′ | (SEQ ID NO: 1567) |
| EGFR-841 21 nt Target: | 5′-GTGATCCAAGCTGTCCCAATG-3′ | (SEQ ID NO: 1568) |
| EGFR-842 21 nt Target: | 5′-TGATCCAAGCTGTCCCAATGG-3′ | (SEQ ID NO: 1569) |
| EGFR-876 21 nt Target: | 5′-GCAGGAGAGGAGAACTGCCAG-3′ | (SEQ ID NO: 1570) |
| EGFR-877 21 nt Target: | 5′-CAGGAGAGGAGAACTGCCAGA-3′ | (SEQ ID NO: 1571) |
| EGFR-878 21 nt Target: | 5′-AGGAGAGGAGAACTGCCAGAA-3′ | (SEQ ID NO: 1572) |
| EGFR-879 21 nt Target: | 5′-GGAGAGGAGAACTGCCAGAAA-3′ | (SEQ ID NO: 1573) |
| EGFR-899 21 nt Target: | 5′-ACTGACCAAAATCATCTGTGC-3′ | (SEQ ID NO: 1574) |
| EGFR-900 21 nt Target: | 5′-CTGACCAAAATCATCTGTGCC-3′ | (SEQ ID NO: 1575) |
| EGFR-901 21 nt Target: | 5′-TGACCAAAATCATCTGTGCCC-3′ | (SEQ ID NO: 1576) |
| EGFR-902 21 nt Target: | 5′-GACCAAAATCATCTGTGCCCA-3′ | (SEQ ID NO: 1577) |
| EGFR-903 21 nt Target: | 5′-ACCAAAATCATCTGTGCCCAG-3′ | (SEQ ID NO: 1578) |
| EGFR-904 21 nt Target: | 5′-CCAAAATCATCTGTGCCCAGC-3′ | (SEQ ID NO: 1579) |
| EGFR-905 21 nt Target: | 5′-CAAAATCATCTGTGCCCAGCA-3′ | (SEQ ID NO: 1580) |
| EGFR-954 21 nt Target: | 5′-CCCAGTGACTGCTGCCACAAC-3′ | (SEQ ID NO: 1581) |
| EGFR-955 21 nt Target: | 5′-CCAGTGACTGCTGCCACAACC-3′ | (SEQ ID NO: 1582) |
| EGFR-956 21 nt Target: | 5′-CAGTGACTGCTGCCACAACCA-3′ | (SEQ ID NO: 1583) |
| EGFR-1313 21 nt Target: | 5′-CTCACTCTCCATAAATGCTAC-3′ | (SEQ ID NO: 1584) |
| EGFR-1480 21 nt Target: | 5′-GGTTTTTGCTGATTCAGGCTT-3′ | (SEQ ID NO: 1585) |
| EGFR-1481 21 nt Target: | 5′-GTTTTTGCTGATTCAGGCTTG-3′ | (SEQ ID NO: 1586) |
| EGFR-1482 21 nt Target: | 5′-TTTTTGCTGATTCAGGCTTGG-3′ | (SEQ ID NO: 1587) |
| EGFR-1483 21 nt Target: | 5′-TTTTGCTGATTCAGGCTTGGC-3′ | (SEQ ID NO: 1588) |
| EGFR-1484 21 nt Target: | 5′-TTTGCTGATTCAGGCTTGGCC-3′ | (SEQ ID NO: 1589) |
| EGFR-1485 21 nt Target: | 5′-TTGCTGATTCAGGCTTGGCCT-3′ | (SEQ ID NO: 1590) |
| EGFR-1486 21 nt Target: | 5′-TGCTGATTCAGGCTTGGCCTG-3′ | (SEQ ID NO: 1591) |
| EGFR-1487 21 nt Target: | 5′-GCTGATTCAGGCTTGGCCTGA-3′ | (SEQ ID NO: 1592) |
| EGFR-1561 21 nt Target: | 5′-CCAAGCAACATGGTCAGTTTT-3′ | (SEQ ID NO: 1593) |
| EGFR-1562 21 nt Target: | 5′-CAAGCAACATGGTCAGTTTTC-3′ | (SEQ ID NO: 1594) |
| EGFR-1563 21 nt Target: | 5′-AAGCAACATGGTCAGTTTTCT-3′ | (SEQ ID NO: 1595) |
| EGFR-1691 21 nt Target: | 5′-TACAATAAACTGGAAAAAACT-3′ | (SEQ ID NO: 1596) |
| EGFR-1963 21 nt Target: | 5′-CTCAGGCCATGAACATCACCT-3′ | (SEQ ID NO: 1597) |
| EGFR-1964 21 nt Target: | 5′-TCAGGCCATGAACATCACCTG-3′ | (SEQ ID NO: 1598) |
| EGFR-2008 21 nt Target: | 5′-GTATCCAGTGTGCCCACTACA-3′ | (SEQ ID NO: 1599) |
| EGFR-2009 21 nt Target: | 5′-TATCCAGTGTGCCCACTACAT-3′ | (SEQ ID NO: 1600) |
| EGFR-2010 21 nt Target: | 5′-ATCCAGTGTGCCCACTACATT-3′ | (SEQ ID NO: 1601) |
| EGFR-2011 21 nt Target: | 5′-TCCAGTGTGCCCACTACATTG-3′ | (SEQ ID NO: 1602) |
| EGFR-2012 21 nt Target: | 5′-CCAGTGTGCCCACTACATTGA-3′ | (SEQ ID NO: 1603) |
| EGFR-2401 21 nt Target: | 5′-CTGAATTCAAAAAGATCAAAG-3′ | (SEQ ID NO: 1604) |
| EGFR-2402 21 nt Target: | 5′-TGAATTCAAAAAGATCAAAGT-3′ | (SEQ ID NO: 1605) |
| EGFR-2458 21 nt Target: | 5′-GACTCTGGATCCCAGAAGGTG-3′ | (SEQ ID NO: 1606) |
| EGFR-2459 21 nt Target: | 5′-ACTCTGGATCCCAGAAGGTGA-3′ | (SEQ ID NO: 1607) |
| EGFR-2460 21 nt Target: | 5′-CTCTGGATCCCAGAAGGTGAG-3′ | (SEQ ID NO: 1608) |
| EGFR-2461 21 nt Target: | 5′-TCTGGATCCCAGAAGGTGAGA-3′ | (SEQ ID NO: 1609) |
| EGFR-2462 21 nt Target: | 5′-CTGGATCCCAGAAGGTGAGAA-3′ | (SEQ ID NO: 1610) |
| EGFR-2463 21 nt Target: | 5′-TGGATCCCAGAAGGTGAGAAA-3′ | (SEQ ID NO: 1611) |
| EGFR-2464 21 nt Target: | 5′-GGATCCCAGAAGGTGAGAAAG-3′ | (SEQ ID NO: 1612) |
| EGFR-2465 21 nt Target: | 5′-GATCCCAGAAGGTGAGAAAGT-3′ | (SEQ ID NO: 1613) |
| EGFR-2815 21 nt Target: | 5′-CGCAGCATGTCAAGATCACAG-3′ | (SEQ ID NO: 1614) |
| EGFR-2816 21 nt Target: | 5′-GCAGCATGTCAAGATCACAGA-3′ | (SEQ ID NO: 1615) |
| EGFR-2817 21 nt Target: | 5′-CAGCATGTCAAGATCACAGAT-3′ | (SEQ ID NO: 1616) |
| EGFR-2818 21 nt Target: | 5′-AGCATGTCAAGATCACAGATT-3′ | (SEQ ID NO: 1617) |
| EGFR-2819 21 nt Target: | 5′-GCATGTCAAGATCACAGATTT-3′ | (SEQ ID NO: 1618) |
| EGFR-2820 21 nt Target: | 5′-CATGTCAAGATCACAGATTTT-3′ | (SEQ ID NO: 1619) |
| EGFR-2821 21 nt Target: | 5′-ATGTCAAGATCACAGATTTTG-3′ | (SEQ ID NO: 1620) |
| EGFR-2822 21 nt Target: | 5′-TGTCAAGATCACAGATTTTGG-3′ | (SEQ ID NO: 1621) |
| EGFR-2823 21 nt Target: | 5′-GTCAAGATCACAGATTTTGGG-3′ | (SEQ ID NO: 1622) |
| EGFR-2824 21 nt Target: | 5′-TCAAGATCACAGATTTTGGGC-3′ | (SEQ ID NO: 1623) |
| EGFR-2825 21 nt Target: | 5′-CAAGATCACAGATTTTGGGCT-3′ | (SEQ ID NO: 1624) |
| EGFR-2826 21 nt Target: | 5′-AAGATCACAGATTTTGGGCTG-3′ | (SEQ ID NO: 1625) |
| EGFR-2827 21 nt Target: | 5′-AGATCACAGATTTTGGGCTGG-3′ | (SEQ ID NO: 1626) |
| EGFR-2828 21 nt Target: | 5′-GATCACAGATTTTGGGCTGGC-3′ | (SEQ ID NO: 1627) |
| EGFR-2829 21 nt Target: | 5′-ATCACAGATTTTGGGCTGGCC-3′ | (SEQ ID NO: 1628) |
| EGFR-2830 21 nt Target: | 5′-TCACAGATTTTGGGCTGGCCA-3′ | (SEQ ID NO: 1629) |
| EGFR-2831 21 nt Target: | 5′-CACAGATTTTGGGCTGGCCAA-3′ | (SEQ ID NO: 1630) |
| EGFR-2832 21 nt Target: | 5′-ACAGATTTTGGGCTGGCCAAA-3′ | (SEQ ID NO: 1631) |
| EGFR-2833 21 nt Target: | 5′-CAGATTTTGGGCTGGCCAAAC-3′ | (SEQ ID NO: 1632) |
| EGFR-2834 21 nt Target: | 5′-AGATTTTGGGCTGGCCAAACT-3′ | (SEQ ID NO: 1633) |
| EGFR-2835 21 nt Target: | 5′-GATTTTGGGCTGGCCAAACTG-3′ | (SEQ ID NO: 1634) |
| EGFR-2836 21 nt Target: | 5′-ATTTTGGGCTGGCCAAACTGC-3′ | (SEQ ID NO: 1635) |
| EGFR-2837 21 nt Target: | 5′-TTTTGGGCTGGCCAAACTGCT-3′ | (SEQ ID NO: 1636) |
| EGFR-2891 21 nt Target: | 5′-AGGCAAAGTGCCTATCAAGTG-3′ | (SEQ ID NO: 1637) |
| EGFR-2892 21 nt Target: | 5′-GGCAAAGTGCCTATCAAGTGG-3′ | (SEQ ID NO: 1638) |
| EGFR-2893 21 nt Target: | 5′-GCAAAGTGCCTATCAAGTGGA-3′ | (SEQ ID NO: 1639) |
| EGFR-2894 21 nt Target: | 5′-CAAAGTGCCTATCAAGTGGAT-3′ | (SEQ ID NO: 1640) |
| EGFR-2895 21 nt Target: | 5′-AAAGTGCCTATCAAGTGGATG-3′ | (SEQ ID NO: 1641) |
| EGFR-2896 21 nt Target: | 5′-AAGTGCCTATCAAGTGGATGG-3′ | (SEQ ID NO: 1642) |
| EGFR-2897 21 nt Target: | 5′-AGTGCCTATCAAGTGGATGGC-3′ | (SEQ ID NO: 1643) |
| EGFR-3088 21 nt Target: | 5′-GTACCATCGATGTCTACATGA-3′ | (SEQ ID NO: 1644) |
| EGFR-3089 21 nt Target: | 5′-TACCATCGATGTCTACATGAT-3′ | (SEQ ID NO: 1645) |
| EGFR-3090 21 nt Target: | 5′-ACCATCGATGTCTACATGATC-3′ | (SEQ ID NO: 1646) |
| EGFR-3091 21 nt Target: | 5′-CCATCGATGTCTACATGATCA-3′ | (SEQ ID NO: 1647) |
| EGFR-3092 21 nt Target: | 5′-CATCGATGTCTACATGATCAT-3′ | (SEQ ID NO: 1648) |
| EGFR-3093 21 nt Target: | 5′-ATCGATGTCTACATGATCATG-3′ | (SEQ ID NO: 1649) |
| EGFR-3094 21 nt Target: | 5′-TCGATGTCTACATGATCATGG-3′ | (SEQ ID NO: 1650) |
| EGFR-3095 21 nt Target: | 5′-CGATGTCTACATGATCATGGT-3′ | (SEQ ID NO: 1651) |
| EGFR-3096 21 nt Target: | 5′-GATGTCTACATGATCATGGTC-3′ | (SEQ ID NO: 1652) |
| EGFR-3097 21 nt Target: | 5′-ATGTCTACATGATCATGGTCA-3′ | (SEQ ID NO: 1653) |
| EGFR-3098 21 nt Target: | 5′-TGTCTACATGATCATGGTCAA-3′ | (SEQ ID NO: 1654) |
| EGFR-3099 21 nt Target: | 5′-GTCTACATGATCATGGTCAAG-3′ | (SEQ ID NO: 1655) |
| EGFR-3100 21 nt Target: | 5′-TCTACATGATCATGGTCAAGT-3′ | (SEQ ID NO: 1656) |
| EGFR-3101 21 nt Target: | 5′-CTACATGATCATGGTCAAGTG-3′ | (SEQ ID NO: 1657) |
| EGFR-3102 21 nt Target: | 5′-TACATGATCATGGTCAAGTGC-3′ | (SEQ ID NO: 1658) |
| EGFR-3103 21 nt Target: | 5′-ACATGATCATGGTCAAGTGCT-3′ | (SEQ ID NO: 1659) |
| EGFR-3104 21 nt Target: | 5′-CATGATCATGGTCAAGTGCTG-3′ | (SEQ ID NO: 1660) |
| EGFR-3105 21 nt Target: | 5′-ATGATCATGGTCAAGTGCTGG-3′ | (SEQ ID NO: 1661) |
| EGFR-3106 21 nt Target: | 5′-TGATCATGGTCAAGTGCTGGA-3′ | (SEQ ID NO: 1662) |
| EGFR-3107 21 nt Target: | 5′-GATCATGGTCAAGTGCTGGAT-3′ | (SEQ ID NO: 1663) |
| EGFR-3108 21 nt Target: | 5′-ATCATGGTCAAGTGCTGGATG-3′ | (SEQ ID NO: 1664) |
| EGFR-3109 21 nt Target: | 5′-TCATGGTCAAGTGCTGGATGA-3′ | (SEQ ID NO: 1665) |
| EGFR-3110 21 nt Target: | 5′-CATGGTCAAGTGCTGGATGAT-3′ | (SEQ ID NO: 1666) |
| EGFR-3111 21 nt Target: | 5′-ATGGTCAAGTGCTGGATGATA-3′ | (SEQ ID NO: 1667) |
| EGFR-3112 21 nt Target: | 5′-TGGTCAAGTGCTGGATGATAG-3′ | (SEQ ID NO: 1668) |
| EGFR-3113 21 nt Target: | 5′-GGTCAAGTGCTGGATGATAGA-3′ | (SEQ ID NO: 1669) |
| EGFR-3169 21 nt Target: | 5′-TCGAATTCTCCAAAATGGCCC-3′ | (SEQ ID NO: 1670) |
| EGFR-3170 21 nt Target: | 5′-CGAATTCTCCAAAATGGCCCG-3′ | (SEQ ID NO: 1671) |
| EGFR-3220 21 nt Target: | 5′-GGGATGAAAGAATGCATTTGC-3′ | (SEQ ID NO: 1672) |
| EGFR-3221 21 nt Target: | 5′-GGATGAAAGAATGCATTTGCC-3′ | (SEQ ID NO: 1673) |
| EGFR-3222 21 nt Target: | 5′-GATGAAAGAATGCATTTGCCA-3′ | (SEQ ID NO: 1674) |
| EGFR-3223 21 nt Target: | 5′-ATGAAAGAATGCATTTGCCAA-3′ | (SEQ ID NO: 1675) |
| EGFR-3224 21 nt Target: | 5′-TGAAAGAATGCATTTGCCAAG-3′ | (SEQ ID NO: 1676) |
| EGFR-3772 21 nt Target: | 5′-TGGACAACCCTGACTACCAGC-3′ | (SEQ ID NO: 1677) |
| EGFR-3773 21 nt Target: | 5′-GGACAACCCTGACTACCAGCA-3′ | (SEQ ID NO: 1678) |
| EGFR-3774 21 nt Target: | 5′-GACAACCCTGACTACCAGCAG-3′ | (SEQ ID NO: 1679) |
| EGFR-3775 21 nt Target: | 5′-ACAACCCTGACTACCAGCAGG-3′ | (SEQ ID NO: 1680) |
| EGFR-3776 21 nt Target: | 5′-CAACCCTGACTACCAGCAGGA-3′ | (SEQ ID NO: 1681) |
| EGFR-3777 21 nt Target: | 5′-AACCCTGACTACCAGCAGGAC-3′ | (SEQ ID NO: 1682) |
| EGFR-3778 21 nt Target: | 5′-ACCCTGACTACCAGCAGGACT-3′ | (SEQ ID NO: 1683) |
| EGFR-3779 21 nt Target: | 5′-CCCTGACTACCAGCAGGACTT-3′ | (SEQ ID NO: 1684) |
| EGFR-m71 21 nt Target: | 5′-CAGCGCAACGCGCAGCAGCCT-3′ | (SEQ ID NO: 1685) |
| EGFR-m78 21 nt Target: | 5′-ACGCGCAGCAGCCTCCCTCCT-3′ | (SEQ ID NO: 1686) |
| EGFR-m87 21 nt Target: | 5′-AGCCTCCCTCCTCTTCTTCCC-3′ | (SEQ ID NO: 1687) |
| EGFR-m90 21 nt Target: | 5′-CTCCCTCCTCTTCTTCCCGCA-3′ | (SEQ ID NO: 1688) |
| EGFR-m92 21 nt Target: | 5′-CCCTCCTCTTCTTCCCGCACT-3′ | (SEQ ID NO: 1689) |
| EGFR-m94 21 nt Target: | 5′-CTCCTCTTCTTCCCGCACTGT-3′ | (SEQ ID NO: 1690) |
| EGFR-m97 21 nt Target: | 5′-CTCTTCTTCCCGCACTGTGCG-3′ | (SEQ ID NO: 1691) |
| EGFR-m99 21 nt Target: | 5′-CTTCTTCCCGCACTGTGCGCT-3′ | (SEQ ID NO: 1692) |
| EGFR-m100 21 nt Target: | 5′-TTCTTCCCGCACTGTGCGCTC-3′ | (SEQ ID NO: 1693) |
| EGFR-m101 21 nt Target: | 5′-TCTTCCCGCACTGTGCGCTCC-3′ | (SEQ ID NO: 1694) |
| EGFR-m111 21 nt Target: | 5′-CTGTGCGCTCCTCCTGGGCTA-3′ | (SEQ ID NO: 1695) |
| EGFR-m114 21 nt Target: | 5′-TGCGCTCCTCCTGGGCTAGGG-3′ | (SEQ ID NO: 1696) |
| EGFR-m333 21 nt Target: | 5′-CACACTGCTGGTGTTGCTGAC-3′ | (SEQ ID NO: 1697) |
| EGFR-m334 21 nt Target: | 5′-ACACTGCTGGTGTTGCTGACC-3′ | (SEQ ID NO: 1698) |
| EGFR-m335 21 nt Target: | 5′-CACTGCTGGTGTTGCTGACCG-3′ | (SEQ ID NO: 1699) |
| EGFR-m336 21 nt Target: | 5′-ACTGCTGGTGTTGCTGACCGC-3′ | (SEQ ID NO: 1700) |
| EGFR-m337 21 nt Target: | 5′-CTGCTGGTGTTGCTGACCGCG-3′ | (SEQ ID NO: 1701) |
| EGFR-m338 21 nt Target: | 5′-TGCTGGTGTTGCTGACCGCGC-3′ | (SEQ ID NO: 1702) |
| EGFR-m339 21 nt Target: | 5′-GCTGGTGTTGCTGACCGCGCT-3′ | (SEQ ID NO: 1703) |
| EGFR-m341 21 nt Target: | 5′-TGGTGTTGCTGACCGCGCTCT-3′ | (SEQ ID NO: 1704) |
| EGFR-m342 21 nt Target: | 5′-GGTGTTGCTGACCGCGCTCTG-3′ | (SEQ ID NO: 1705) |
| EGFR-m343 21 nt Target: | 5′-GTGTTGCTGACCGCGCTCTGC-3′ | (SEQ ID NO: 1706) |
| EGFR-m344 21 nt Target: | 5′-TGTTGCTGACCGCGCTCTGCG-3′ | (SEQ ID NO: 1707) |
| EGFR-m347 21 nt Target: | 5′-TGCTGACCGCGCTCTGCGCCG-3′ | (SEQ ID NO: 1708) |
| EGFR-m348 21 nt Target: | 5′-GCTGACCGCGCTCTGCGCCGC-3′ | (SEQ ID NO: 1709) |
| EGFR-m734 21 nt Target: | 5′-TCCTGATTGGTGCTGTGCGAT-3′ | (SEQ ID NO: 1710) |
| EGFR-m735 21 nt Target: | 5′-CCTGATTGGTGCTGTGCGATT-3′ | (SEQ ID NO: 1711) |
| EGFR-m736 21 nt Target: | 5′-CTGATTGGTGCTGTGCGATTC-3′ | (SEQ ID NO: 1712) |
| EGFR-m738 21 nt Target: | 5′-GATTGGTGCTGTGCGATTCAG-3′ | (SEQ ID NO: 1713) |
| EGFR-m740 21 nt Target: | 5′-TTGGTGCTGTGCGATTCAGCA-3′ | (SEQ ID NO: 1714) |
| EGFR-m741 21 nt Target: | 5′-TGGTGCTGTGCGATTCAGCAA-3′ | (SEQ ID NO: 1715) |
| EGFR-m879 21 nt Target: | 5′-TCCAAGCTGTCCCAATGGAAG-3′ | (SEQ ID NO: 1716) |
| EGFR-m948 21 nt Target: | 5′-CTGTGCCCAGCAATGTTCCCA-3′ | (SEQ ID NO: 1717) |
| EGFR-m1154 21 nt Target: | 5′-GGAAGTACAGCTTTGGTGCCA-3′ | (SEQ ID NO: 1718) |
| EGFR-m1302 21 nt Target: | 5′-CTGTCGCAAAGTTTGTAATGG-3′ | (SEQ ID NO: 1719) |
| EGFR-m1439 21 nt Target: | 5′-GGGATTCTTTCACGCGCACTC-3′ | (SEQ ID NO: 1720) |
| EGFR-m1509 21 nt Target: | 5′-AACAGGCTTTTTGCTGATTCA-3′ | (SEQ ID NO: 1721) |
| EGFR-m1526 21 nt Target: | 5′-TTCAGGCTTGGCCTGATAACT-3′ | (SEQ ID NO: 1722) |
| EGFR-m1528 21 nt Target: | 5′-CAGGCTTGGCCTGATAACTGG-3′ | (SEQ ID NO: 1723) |
| EGFR-m1531 21 nt Target: | 5′-GCTTGGCCTGATAACTGGACT-3′ | (SEQ ID NO: 1724) |
| EGFR-m2168 21 nt Target: | 5′-ACGCCAACTGTACCTATGGAT-3′ | (SEQ ID NO: 1725) |
| EGFR-m2253 21 nt Target: | 5′-CACTGGGATTGTGGGTGGCCT-3′ | (SEQ ID NO: 1726) |
| EGFR-m2286 21 nt Target: | 5′-GGTGGTGGCCCTTGGGATTGG-3′ | (SEQ ID NO: 1727) |
| EGFR-m2301 21 nt Target: | 5′-GATTGGCCTATTCATGCGAAG-3′ | (SEQ ID NO: 1728) |
| EGFR-m2350 21 nt Target: | 5′-CGCCGCCTGCTTCAAGAGAGA-3′ | (SEQ ID NO: 1729) |
| EGFR-m2351 21 nt Target: | 5′-GCCGCCTGCTTCAAGAGAGAG-3′ | (SEQ ID NO: 1730) |
| EGFR-m2352 21 nt Target: | 5′-CCGCCTGCTTCAAGAGAGAGA-3′ | (SEQ ID NO: 1731) |
| EGFR-m2617 21 nt Target: | 5′-GTGGACAACCCTCATGTATGC-3′ | (SEQ ID NO: 1732) |
| EGFR-m2631 21 nt Target: | 5′-TGTATGCCGCCTCCTGGGCAT-3′ | (SEQ ID NO: 1733) |
| EGFR-m2683 21 nt Target: | 5′-CAGCTCATGCCCTACGGTTGC-3′ | (SEQ ID NO: 1734) |
| EGFR-m2684 21 nt Target: | 5′-AGCTCATGCCCTACGGTTGCC-3′ | (SEQ ID NO: 1735) |
| EGFR-m2800 21 nt Target: | 5′-GATCGGCGTTTGGTGCACCGT-3′ | (SEQ ID NO: 1736) |
| EGFR-m2805 21 nt Target: | 5′-GCGTTTGGTGCACCGTGACTT-3′ | (SEQ ID NO: 1737) |
| EGFR-m2879 21 nt Target: | 5′-TTGGGCTGGCCAAACTGCTTG-3′ | (SEQ ID NO: 1738) |
| EGFR-m2880 21 nt Target: | 5′-TGGGCTGGCCAAACTGCTTGG-3′ | (SEQ ID NO: 1739) |
| EGFR-m2882 21 nt Target: | 5′-GGCTGGCCAAACTGCTTGGTG-3′ | (SEQ ID NO: 1740) |
| EGFR-m2883 21 nt Target: | 5′-GCTGGCCAAACTGCTTGGTGC-3′ | (SEQ ID NO: 1741) |
| EGFR-m3154 21 nt Target: | 5′-GTCAAGTGCTGGATGATAGAT-3′ | (SEQ ID NO: 1742) |
| EGFR-m3155 21 nt Target: | 5′-TCAAGTGCTGGATGATAGATG-3′ | (SEQ ID NO: 1743) |
| EGFR-m3156 21 nt Target: | 5′-CAAGTGCTGGATGATAGATGC-3′ | (SEQ ID NO: 1744) |
| EGFR-m3157 21 nt Target: | 5′-AAGTGCTGGATGATAGATGCT-3′ | (SEQ ID NO: 1745) |
| EGFR-m3158 21 nt Target: | 5′-AGTGCTGGATGATAGATGCTG-3′ | (SEQ ID NO: 1746) |
| EGFR-m3159 21 nt Target: | 5′-GTGCTGGATGATAGATGCTGA-3′ | (SEQ ID NO: 1747) |
| EGFR-m3160 21 nt Target: | 5′-TGCTGGATGATAGATGCTGAT-3′ | (SEQ ID NO: 1748) |
| EGFR-m3161 21 nt Target: | 5′-GCTGGATGATAGATGCTGATA-3′ | (SEQ ID NO: 1749) |
| EGFR-m3162 21 nt Target: | 5′-CTGGATGATAGATGCTGATAG-3′ | (SEQ ID NO: 1750) |
| EGFR-m3163 21 nt Target: | 5′-TGGATGATAGATGCTGATAGC-3′ | (SEQ ID NO: 1751) |
| EGFR-m3166 21 nt Target: | 5′-ATGATAGATGCTGATAGCCGC-3′ | (SEQ ID NO: 1752) |
| EGFR-m3168 21 nt Target: | 5′-GATAGATGCTGATAGCCGCCC-3′ | (SEQ ID NO: 1753) |
| EGFR-m3474 21 nt Target: | 5′-GAGCTGCCGTGTCAAAGAAGA-3′ | (SEQ ID NO: 1754) |
| EGFR-m3475 21 nt Target: | 5′-AGCTGCCGTGTCAAAGAAGAC-3′ | (SEQ ID NO: 1755) |
| EGFR-m3491 21 nt Target: | 5′-AAGACGCCTTCTTGCAGCGGT-3′ | (SEQ ID NO: 1756) |
| EGFR-m3492 21 nt Target: | 5′-AGACGCCTTCTTGCAGCGGTA-3′ | (SEQ ID NO: 1757) |
| EGFR-m3493 21 nt Target: | 5′-GACGCCTTCTTGCAGCGGTAC-3′ | (SEQ ID NO: 1758) |
| EGFR-m3494 21 nt Target: | 5′-ACGCCTTCTTGCAGCGGTACA-3′ | (SEQ ID NO: 1759) |
| EGFR-m3495 21 nt Target: | 5′-CGCCTTCTTGCAGCGGTACAG-3′ | (SEQ ID NO: 1760) |
| EGFR-m3496 21 nt Target: | 5′-GCCTTCTTGCAGCGGTACAGC-3′ | (SEQ ID NO: 1761) |
| EGFR-m3497 21 nt Target: | 5′-CCTTCTTGCAGCGGTACAGCT-3′ | (SEQ ID NO: 1762) |
| EGFR-m4056 21 nt Target: | 5′-GACTGGCTTTAAAGCATAACT-3′ | (SEQ ID NO: 1763) |
| EGFR-m4103 21 nt Target: | 5′-AAGTGGGCCTCTCTCCTGATG-3′ | (SEQ ID NO: 1764) |
| EGFR-m4104 21 nt Target: | 5′-AGTGGGCCTCTCTCCTGATGC-3′ | (SEQ ID NO: 1765) |
| EGFR-m4105 21 nt Target: | 5′-GTGGGCCTCTCTCCTGATGCA-3′ | (SEQ ID NO: 1766) |
| EGFR-m4106 21 nt Target: | 5′-TGGGCCTCTCTCCTGATGCAC-3′ | (SEQ ID NO: 1767) |
| EGFR-m4109 21 nt Target: | 5′-GCCTCTCTCCTGATGCACTTT-3′ | (SEQ ID NO: 1768) |
| EGFR-m4309 21 nt Target: | 5′-GATTGATGCACTCTTGTAGTC-3′ | (SEQ ID NO: 1769) |
| EGFR-m4619 21 nt Target: | 5′-TAGACTTCCTTCTATGTTTTC-3′ | (SEQ ID NO: 1770) |
| EGFR-m4627 21 nt Target: | 5′-CTTCTATGTTTTCTGTTTCAT-3′ | (SEQ ID NO: 1771) |
| EGFR-m5006 21 nt Target: | 5′-TATGTTTTTCTTCCTGGTAAA-3′ | (SEQ ID NO: 1772) |
| EGFR-m5007 21 nt Target: | 5′-ATGTTTTTCTTCCTGGTAAAC-3′ | (SEQ ID NO: 1773) |
| EGFR-m5008 21 nt Target: | 5′-TGTTTTTCTTCCTGGTAAACT-3′ | (SEQ ID NO: 1774) |
| EGFR-m5012 21 nt Target: | 5′-TTTCTTCCTGGTAAACTGCAG-3′ | (SEQ ID NO: 1775) |
| EGFR-m5329 21 nt Target: | 5′-TTCGATCTTCCTAATGCTGTG-3′ | (SEQ ID NO: 1776) |
| EGFR-m5330 21 nt Target: | 5′-TCGATCTTCCTAATGCTGTGA-3′ | (SEQ ID NO: 1777) |
| EGFR-m5403 21 nt Target: | 5′-TTGTTGCTACTTCATAACTGT-3′ | (SEQ ID NO: 1778) |
| EGFR-m5638 21 nt Target: | 5′-GCTTGCAGCATCCTCTGGTTT-3′ | (SEQ ID NO: 1779) |
| EGFR-m5895 21 nt Target: | 5′-CGTTGCAAGCCACTCTAACTG-3′ | (SEQ ID NO: 1780) |

21 NUCLEOTIDE TARGET mRNA SEQUENCES

| | | |
|---|---|---|
| EGFR-31 21 nt Target: | 5′-GGCGCAGCGCGGCCGCAGCAG-3′ | (SEQ ID NO: 2509) |
| EGFR-32 21 nt Target: | 5′-GCGCAGCGCGGCCGCAGCAGC-3′ | (SEQ ID NO: 2510) |
| EGFR-34 21 nt Target: | 5′-GCAGCGCGGCCGCAGCAGCCU-3′ | (SEQ ID NO: 2511) |
| EGFR-298 21 nt Target: | 5′-CAGCGCUCCUGGCGCUGCUGG-3′ | (SEQ ID NO: 2512) |
| EGFR-300 21 nt Target: | 5′-GCGCUCCUGGCGCUGCUGGCU-3′ | (SEQ ID NO: 2513) |
| EGFR-302 21 nt Target: | 5′-GCUCCUGGCGCUGCUGGCUGC-3′ | (SEQ ID NO: 2514) |
| EGFR-390 21 nt Target: | 5′-CAGUUGGGCACUUUUGAAGAU-3′ | (SEQ ID NO: 2515) |
| EGFR-458 21 nt Target: | 5′-UGGGAAUUUGGAAAUUACCUA-3′ | (SEQ ID NO: 2516) |
| EGFR-489 21 nt Target: | 5′-AAUUAUGAUCUUUCCUUCUUA-3′ | (SEQ ID NO: 2517) |
| EGFR-525 21 nt Target: | 5′-GUGGCUGGUUAUGUCCUCAUU-3′ | (SEQ ID NO: 2518) |
| EGFR-676 21 nt Target: | 5′-UGCCCAUGAGAAAUUUACAGG-3′ | (SEQ ID NO: 2519) |
| EGFR-701 21 nt Target: | 5′-CCUGCAUGGCGCCGUGCGGUU-3′ | (SEQ ID NO: 2520) |
| EGFR-707 21 nt Target: | 5′-UGGCGCCGUGCGGUUCAGCAA-3′ | (SEQ ID NO: 2521) |
| EGFR-707 21 nt Target: | 5′-UGGCGCCGUGCGGUUCAGCAA-3′ | (SEQ ID NO: 2522) |
| EGFR-709 21 nt Target: | 5′-GCGCCGUGCGGUUCAGCAACA-3′ | (SEQ ID NO: 2523) |
| EGFR-710 21 nt Target: | 5′-CGCCGUGCGGUUCAGCAACAA-3′ | (SEQ ID NO: 2524) |
| EGFR-827 21 nt Target: | 5′-CAGCUGCCAAAAGUGUGAUCC-3′ | (SEQ ID NO: 2525) |
| EGFR-912 21 nt Target: | 5′-AUCUGUGCCCAGCAGUGCUCC-3′ | (SEQ ID NO: 2526) |
| EGFR-914 21 nt Target: | 5′-CUGUGCCCAGCAGUGCUCCGG-3′ | (SEQ ID NO: 2527) |
| EGFR-926 21 nt Target: | 5′-GUGCUCCGGGCGCUGCCGUGG-3′ | (SEQ ID NO: 2528) |
| EGFR-1005 21 nt Target: | 5′-GAGAGCGACUGCCUGGUCUGC-3′ | (SEQ ID NO: 2529) |
| EGFR-1013 21 nt Target: | 5′-CUGCCUGGUCUGCCGCAAAUU-3′ | (SEQ ID NO: 2530) |
| EGFR-1175 21 nt Target: | 5′-GACAGAUCACGGCUCGUGCGU-3′ | (SEQ ID NO: 2531) |
| EGFR-1271 21 nt Target: | 5′-CCGCAAAGUGUGUAACGGAAU-3′ | (SEQ ID NO: 2532) |
| EGFR-1286 21 nt Target: | 5′-CGGAAUAGGUAUUGGUGAAUU-3′ | (SEQ ID NO: 2533) |
| EGFR-1330 21 nt Target: | 5′-CUACGAAUAUUAAACACUUCA-3′ | (SEQ ID NO: 2534) |
| EGFR-1437 21 nt Target: | 5′-CCACAGGAACUGGAUAUUCUG-3′ | (SEQ ID NO: 2535) |
| EGFR-1475 21 nt Target: | 5′-CACAGGGUUUUUGCUGAUUCA-3′ | (SEQ ID NO: 2536) |
| EGFR-1661 21 nt Target: | 5′-UUCAGGAAACAAAAAUUUGUG-3′ | (SEQ ID NO: 2537) |
| EGFR-1679 21 nt Target: | 5′-GUGCUAUGCAAAUACAAUAAA-3′ | (SEQ ID NO: 2538) |
| EGFR-1723 21 nt Target: | 5′-CCGGUCAGAAAACCAAAAUUA-3′ | (SEQ ID NO: 2539) |
| EGFR-1838 21 nt Target: | 5′-CUGCGUCUCUUGCCGGAAUGU-3′ | (SEQ ID NO: 2540) |
| EGFR-2227 21 nt Target: | 5′-GGGCCCUCCUCUUGCUGCUGG-3′ | (SEQ ID NO: 2541) |
| EGFR-2228 21 nt Target: | 5′-GGCCCUCCUCUUGCUGCUGGU-3′ | (SEQ ID NO: 2542) |
| EGFR-2232 21 nt Target: | 5′-CUCCUCUUGCUGCUGGUGGUG-3′ | (SEQ ID NO: 2543) |
| EGFR-2233 21 nt Target: | 5′-UCCUCUUGCUGCUGGUGGUGG-3′ | (SEQ ID NO: 2544) |
| EGFR-2295 21 nt Target: | 5′-CGGAAGCGCACGCUGCGGAGG-3′ | (SEQ ID NO: 2545) |
| EGFR-2298 21 nt Target: | 5′-AAGCGCACGCUGCGGAGGCUG-3′ | (SEQ ID NO: 2546) |
| EGFR-2399 21 nt Target: | 5′-AACUGAAUUCAAAAAGAUCAA-3′ | (SEQ ID NO: 2547) |
| EGFR-2417 21 nt Target: | 5′-CAAAGUGCUGGGCUCCGGUGC-3′ | (SEQ ID NO: 2548) |
| EGFR-2419 21 nt Target: | 5′-AAGUGCUGGGCUCCGGUGCGU-3′ | (SEQ ID NO: 2549) |
| EGFR-2420 21 nt Target: | 5′-AGUGCUGGGCUCCGGUGCGUU-3′ | (SEQ ID NO: 2550) |
| EGFR-2421 21 nt Target: | 5′-GUGCUGGGCUCCGGUGCGUUC-3′ | (SEQ ID NO: 2551) |
| EGFR-2422 21 nt Target: | 5′-UGCUGGGCUCCGGUGCGUUCG-3′ | (SEQ ID NO: 2552) |
| EGFR-2591 21 nt Target: | 5′-CGUGUGCCGCCUGCUGGGCAU-3′ | (SEQ ID NO: 2553) |
| EGFR-2592 21 nt Target: | 5′-GUGUGCCGCCUGCUGGGCAUC-3′ | (SEQ ID NO: 2554) |
| EGFR-2594 21 nt Target: | 5′-GUGCCGCCUGCUGGGCAUCUG-3′ | (SEQ ID NO: 2555) |
| EGFR-2624 21 nt Target: | 5′-CACCGUGCAGCUCAUCACGCA-3′ | (SEQ ID NO: 2556) |
| EGFR-2627 21 nt Target: | 5′-CGUGCAGCUCAUCACGCAGCU-3′ | (SEQ ID NO: 2557) |
| EGFR-2631 21 nt Target: | 5′-CAGCUCAUCACGCAGCUCAUG-3′ | (SEQ ID NO: 2558) |
| EGFR-2632 21 nt Target: | 5′-AGCUCAUCACGCAGCUCAUGC-3′ | (SEQ ID NO: 2559) |
| EGFR-2643 21 nt Target: | 5′-CAGCUCAUGCCCUUCGGCUGC-3′ | (SEQ ID NO: 2560) |
| EGFR-2644 21 nt Target: | 5′-AGCUCAUGCCCUUCGGCUGCC-3′ | (SEQ ID NO: 2561) |
| EGFR-2754 21 nt Target: | 5′-UUGGAGGACCGUCGCUUGGUG-3′ | (SEQ ID NO: 2562) |
| EGFR-2756 21 nt Target: | 5′-GGAGGACCGUCGCUUGGUGCA-3′ | (SEQ ID NO: 2563) |
| EGFR-2757 21 nt Target: | 5′-GAGGACCGUCGCUUGGUGCAC-3′ | (SEQ ID NO: 2564) |
| EGFR-2758 21 nt Target: | 5′-AGGACCGUCGCUUGGUGCACC-3′ | (SEQ ID NO: 2565) |
| EGFR-2760 21 nt Target: | 5′-GACCGUCGCUUGGUGCACCGC-3′ | (SEQ ID NO: 2566) |
| EGFR-2762 21 nt Target: | 5′-CCGUCGCUUGGUGCACCGCGA-3′ | (SEQ ID NO: 2567) |
| EGFR-2764 21 nt Target: | 5′-GUCGCUUGGUGCACCGCGACC-3′ | (SEQ ID NO: 2568) |
| EGFR-2765 21 nt Target: | 5′-UCGCUUGGUGCACCGCGACCU-3′ | (SEQ ID NO: 2569) |
| EGFR-2767 21 nt Target: | 5′-GCUUGGUGCACCGCGACCUGG-3′ | (SEQ ID NO: 2570) |
| EGFR-2915 21 nt Target: | 5′-GGCAUUGGAAUCAAUUUUACA-3′ | (SEQ ID NO: 2571) |
| EGFR-3115 21 nt Target: | 5′-UCAAGUGCUGGAUGAUAGACG-3′ | (SEQ ID NO: 2572) |
| EGFR-3117 21 nt Target: | 5′-AAGUGCUGGAUGAUAGACGCA-3′ | (SEQ ID NO: 2573) |
| EGFR-3118 21 nt Target: | 5′-AGUGCUGGAUGAUAGACGCAG-3′ | (SEQ ID NO: 2574) |
| EGFR-3120 21 nt Target: | 5′-UGCUGGAUGAUAGACGCAGAU-3′ | (SEQ ID NO: 2575) |
| EGFR-3372 21 nt Target: | 5′-CUCCUGAGCUCUCUGAGUGCA-3′ | (SEQ ID NO: 2576) |
| EGFR-3375 21 nt Target: | 5′-CUGAGCUCUCUGAGUGCAACC-3′ | (SEQ ID NO: 2577) |
| EGFR-3440 21 nt Target: | 5′-AAGCUGUCCCAUCAAGGAAGA-3′ | (SEQ ID NO: 2578) |
| EGFR-3441 21 nt Target: | 5′-AGCUGUCCCAUCAAGGAAGAC-3′ | (SEQ ID NO: 2579) |
| EGFR-3457 21 nt Target: | 5′-AAGACAGCUUCUUGCAGCGAU-3′ | (SEQ ID NO: 2580) |
| EGFR-3458 21 nt Target: | 5′-AGACAGCUUCUUGCAGCGAUA-3′ | (SEQ ID NO: 2581) |
| EGFR-3459 21 nt Target: | 5′-GACAGCUUCUUGCAGCGAUAC-3′ | (SEQ ID NO: 2582) |
| EGFR-3460 21 nt Target: | 5′-ACAGCUUCUUGCAGCGAUACA-3′ | (SEQ ID NO: 2583) |
| EGFR-3461 21 nt Target: | 5′-CAGCUUCUUGCAGCGAUACAG-3′ | (SEQ ID NO: 2584) |
| EGFR-3463 21 nt Target: | 5′-GCUUCUUGCAGCGAUACAGCU-3′ | (SEQ ID NO: 2585) |
| EGFR-3876 21 nt Target: | 5′-CCACAAAGCAGUGAAUUUAUU-3′ | (SEQ ID NO: 2586) |
| EGFR-4178 21 nt Target: | 5′-GUAUAUUUGAAAAAAAAAAAA-3′ | (SEQ ID NO: 2587) |
| EGFR-4205 21 nt Target: | 5′-UGUGAGGAUUUUUAUUGAUUG-3′ | (SEQ ID NO: 2588) |
| EGFR-4249 21 nt Target: | 5′-CGCUAUUGAUUUUUACUUCAA-3′ | (SEQ ID NO: 2589) |
| EGFR-4284 21 nt Target: | 5′-AAGGAAGAAGCUUGCUGGUAG-3′ | (SEQ ID NO: 2590) |
| EGFR-4285 21 nt Target: | 5′-AGGAAGAAGCUUGCUGGUAGC-3′ | (SEQ ID NO: 2591) |
| EGFR-4286 21 nt Target: | 5′-GGAAGAAGCUUGCUGGUAGCA-3′ | (SEQ ID NO: 2592) |
| EGFR-4287 21 nt Target: | 5′-GAAGAAGCUUGCUGGUAGCAC-3′ | (SEQ ID NO: 2593) |
| EGFR-4288 21 nt Target: | 5′-AAGAAGCUUGCUGGUAGCACU-3′ | (SEQ ID NO: 2594) |
| EGFR-4290 21 nt Target: | 5′-GAAGCUUGCUGGUAGCACUUG-3′ | (SEQ ID NO: 2595) |
| EGFR-4291 21 nt Target: | 5′-AAGCUUGCUGGUAGCACUUGC-3′ | (SEQ ID NO: 2596) |
| EGFR-4292 21 nt Target: | 5′-AGCUUGCUGGUAGCACUUGCU-3′ | (SEQ ID NO: 2597) |
| EGFR-4293 21 nt Target: | 5′-GCUUGCUGGUAGCACUUGCUA-3′ | (SEQ ID NO: 2598) |
| EGFR-4294 21 nt Target: | 5′-CUUGCUGGUAGCACUUGCUAC-3′ | (SEQ ID NO: 2599) |
| EGFR-4295 21 nt Target: | 5′-UUGCUGGUAGCACUUGCUACC-3′ | (SEQ ID NO: 2600) |
| EGFR-4372 21 nt Target: | 5′-GGAUGCUUGAUUCCAGUGGUU-3′ | (SEQ ID NO: 2601) |
| EGFR-4373 21 nt Target: | 5′-GAUGCUUGAUUCCAGUGGUUC-3′ | (SEQ ID NO: 2602) |
| EGFR-4450 21 nt Target: | 5′-AGCAGGCCGGAUCGGUACUGU-3′ | (SEQ ID NO: 2603) |
| EGFR-4455 21 nt Target: | 5′-GCCGGAUCGGUACUGUAUCAA-3′ | (SEQ ID NO: 2604) |
| EGFR-4550 21 nt Target: | 5′-UCCUUAGACUUACUUUUGUAA-3′ | (SEQ ID NO: 2605) |
| EGFR-4684 21 nt Target: | 5′-CUGUCUUGCUGUCAUGAAAUC-3′ | (SEQ ID NO: 2606) |
| EGFR-4804 21 nt Target: | 5′-CCUAAGGAUAGCACCGCUUUU-3′ | (SEQ ID NO: 2607) |
| EGFR-4806 21 nt Target: | 5′-UAAGGAUAGCACCGCUUUUGU-3′ | (SEQ ID NO: 2608) |
| EGFR-4807 21 nt Target: | 5′-AAGGAUAGCACCGCUUUUGUU-3′ | (SEQ ID NO: 2609) |
| EGFR-4808 21 nt Target: | 5′-AGGAUAGCACCGCUUUUGUUC-3′ | (SEQ ID NO: 2610) |
| EGFR-4809 21 nt Target: | 5′-GGAUAGCACCGCUUUUGUUCU-3′ | (SEQ ID NO: 2611) |
| EGFR-4810 21 nt Target: | 5′-GAUAGCACCGCUUUUGUUCUC-3′ | (SEQ ID NO: 2612) |
| EGFR-4811 21 nt Target: | 5′-AUAGCACCGCUUUUGUUCUCG-3′ | (SEQ ID NO: 2613) |
| EGFR-4812 21 nt Target: | 5′-UAGCACCGCUUUUGUUCUCGC-3′ | (SEQ ID NO: 2614) |
| EGFR-4813 21 nt Target: | 5′-AGCACCGCUUUUGUUCUCGCA-3′ | (SEQ ID NO: 2615) |
| EGFR-4816 21 nt Target: | 5′-ACCGCUUUUGUUCUCGCAAAA-3′ | (SEQ ID NO: 2616) |
| EGFR-4817 21 nt Target: | 5′-CCGCUUUUGUUCUCGCAAAAA-3′ | (SEQ ID NO: 2617) |
| EGFR-4818 21 nt Target: | 5′-CGCUUUUGUUCUCGCAAAAAC-3′ | (SEQ ID NO: 2618) |
| EGFR-4819 21 nt Target: | 5′-GCUUUUGUUCUCGCAAAAACG-3′ | (SEQ ID NO: 2619) |
| EGFR-4824 21 nt Target: | 5′-UGUUCUCGCAAAAACGUAUCU-3′ | (SEQ ID NO: 2620) |
| EGFR-4953 21 nt Target: | 5′-CAAAAUUAGUUUGUGUUACUU-3′ | (SEQ ID NO: 2621) |
| EGFR-4970 21 nt Target: | 5′-ACUUAUGGAAGAUAGUUUUCU-3′ | (SEQ ID NO: 2622) |
| EGFR-5003 21 nt Target: | 5′-CUUCAAAAGCUUUUUACUCAA-3′ | (SEQ ID NO: 2623) |
| EGFR-5206 21 nt Target: | 5′-AAACUAGGGUUUGAAAUUGAU-3′ | (SEQ ID NO: 2624) |
| EGFR-5275 21 nt Target: | 5′-CCUAAAAUAAUUUCUCUACAA-3′ | (SEQ ID NO: 2625) |
| EGFR-5374 21 nt Target: | 5′-AACAGCAGUCCUUUGUAAACA-3′ | (SEQ ID NO: 2626) |
| EGFR-5429 21 nt Target: | 5′-UCCAAUUUAUCAAGGAAGAAA-3′ | (SEQ ID NO: 2627) |
| EGFR-5497 21 nt Target: | 5′-CAUACAAAAUGUUCCUUUUGC-3′ | (SEQ ID NO: 2628) |
| EGFR-5505 21 nt Target: | 5′-AUGUUCCUUUUGCUUUUAAAG-3′ | (SEQ ID NO: 2629) |
| EGFR-5506 21 nt Target: | 5′-UGUUCCUUUUGCUUUUAAAGU-3′ | (SEQ ID NO: 2630) |
| EGFR-5512 21 nt Target: | 5′-UUUUGCUUUUAAAGUAAUUUU-3′ | (SEQ ID NO: 2631) |
| EGFR-5565 21 nt Target: | 5′-UUGUUAAGAAAGUAUUUGAUU-3′ | (SEQ ID NO: 2632) |
| EGFR-463 21 nt Target: | 5′-AUUUGGAAAUUACCUAUGUGC-3′ | (SEQ ID NO: 2633) |
| EGFR-464 21 nt Target: | 5′-UUUGGAAAUUACCUAUGUGCA-3′ | (SEQ ID NO: 2634) |
| EGFR-496 21 nt Target: | 5′-AUCUUUCCUUCUUAAAGACCA-3′ | (SEQ ID NO: 2635) |
| EGFR-497 21 nt Target: | 5′-UCUUUCCUUCUUAAAGACCAU-3′ | (SEQ ID NO: 2636) |
| EGFR-498 21 nt Target: | 5′-CUUUCCUUCUUAAAGACCAUC-3′ | (SEQ ID NO: 2637) |
| EGFR-499 21 nt Target: | 5′-UUUCCUUCUUAAAGACCAUCC-3′ | (SEQ ID NO: 2638) |
| EGFR-500 21 nt Target: | 5′-UUCCUUCUUAAAGACCAUCCA-3′ | (SEQ ID NO: 2639) |
| EGFR-501 21 nt Target: | 5′-UCCUUCUUAAAGACCAUCCAG-3′ | (SEQ ID NO: 2640) |
| EGFR-502 21 nt Target: | 5′-CCUUCUUAAAGACCAUCCAGG-3′ | (SEQ ID NO: 2641) |
| EGFR-503 21 nt Target: | 5′-CUUCUUAAAGACCAUCCAGGA-3′ | (SEQ ID NO: 2642) |
| EGFR-504 21 nt Target: | 5′-UUCUUAAAGACCAUCCAGGAG-3′ | (SEQ ID NO: 2643) |
| EGFR-505 21 nt Target: | 5′-UCUUAAAGACCAUCCAGGAGG-3′ | (SEQ ID NO: 2644) |
| EGFR-506 21 nt Target: | 5′-CUUAAAGACCAUCCAGGAGGU-3′ | (SEQ ID NO: 2645) |
| EGFR-507 21 nt Target: | 5′-UUAAAGACCAUCCAGGAGGUG-3′ | (SEQ ID NO: 2646) |
| EGFR-508 21 nt Target: | 5′-UAAAGACCAUCCAGGAGGUGG-3′ | (SEQ ID NO: 2647) |
| EGFR-509 21 nt Target: | 5′-AAAGACCAUCCAGGAGGUGGC-3′ | (SEQ ID NO: 2648) |
| EGFR-838 21 nt Target: | 5′-AGUGUGAUCCAAGCUGUCCCA-3′ | (SEQ ID NO: 2649) |
| EGFR-839 21 nt Target: | 5′-GUGUGAUCCAAGCUGUCCCAA-3′ | (SEQ ID NO: 2650) |
| EGFR-840 21 nt Target: | 5′-UGUGAUCCAAGCUGUCCCAAU-3′ | (SEQ ID NO: 2651) |
| EGFR-841 21 nt Target: | 5′-GUGAUCCAAGCUGUCCCAAUG-3′ | (SEQ ID NO: 2652) |
| EGFR-842 21 nt Target: | 5′-UGAUCCAAGCUGUCCCAAUGG-3′ | (SEQ ID NO: 2653) |
| EGFR-876 21 nt Target: | 5′-GCAGGAGAGGAGAACUGCCAG-3′ | (SEQ ID NO: 2654) |
| EGFR-877 21 nt Target: | 5′-CAGGAGAGGAGAACUGCCAGA-3′ | (SEQ ID NO: 2655) |
| EGFR-878 21 nt Target: | 5′-AGGAGAGGAGAACUGCCAGAA-3′ | (SEQ ID NO: 2656) |
| EGFR-879 21 nt Target: | 5′-GGAGAGGAGAACUGCCAGAAA-3′ | (SEQ ID NO: 2657) |
| EGFR-899 21 nt Target: | 5′-ACUGACCAAAAUCAUCUGUGC-3′ | (SEQ ID NO: 2658) |
| EGFR-900 21 nt Target: | 5′-CUGACCAAAAUCAUCUGUGCC-3′ | (SEQ ID NO: 2659) |
| EGFR-901 21 nt Target: | 5′-UGACCAAAAUCAUCUGUGCCC-3′ | (SEQ ID NO: 2660) |
| EGFR-902 21 nt Target: | 5′-GACCAAAAUCAUCUGUGCCCA-3′ | (SEQ ID NO: 2661) |
| EGFR-903 21 nt Target: | 5′-ACCAAAAUCAUCUGUGCCCAG-3′ | (SEQ ID NO: 2662) |
| EGFR-904 21 nt Target: | 5′-CCAAAAUCAUCUGUGCCCAGC-3′ | (SEQ ID NO: 2663) |
| EGFR-905 21 nt Target: | 5′-CAAAAUCAUCUGUGCCCAGCA-3′ | (SEQ ID NO: 2664) |
| EGFR-954 21 nt Target: | 5′-CCCAGUGACUGCUGCCACAAC-3′ | (SEQ ID NO: 2665) |
| EGFR-955 21 nt Target: | 5′-CCAGUGACUGCUGCCACAACC-3′ | (SEQ ID NO: 2666) |
| EGFR-956 21 nt Target: | 5′-CAGUGACUGCUGCCACAACCA-3′ | (SEQ ID NO: 2667) |
| EGFR-1313 21 nt Target: | 5′-CUCACUCUCCAUAAAUGCUAC-3′ | (SEQ ID NO: 2668) |
| EGFR-1480 21 nt Target: | 5′-GGUUUUUGCUGAUUCAGGCUU-3′ | (SEQ ID NO: 2669) |
| EGFR-1481 21 nt Target: | 5′-GUUUUUGCUGAUUCAGGCUUG-3′ | (SEQ ID NO: 2670) |
| EGFR-1482 21 nt Target: | 5′-UUUUUGCUGAUUCAGGCUUGG-3′ | (SEQ ID NO: 2671) |
| EGFR-1483 21 nt Target: | 5′-UUUUGCUGAUUCAGGCUUGGC-3′ | (SEQ ID NO: 2672) |
| EGFR-1484 21 nt Target: | 5′-UUUGCUGAUUCAGGCUUGGCC-3′ | (SEQ ID NO: 2673) |
| EGFR-1485 21 nt Target: | 5′-UUGCUGAUUCAGGCUUGGCCU-3′ | (SEQ ID NO: 2674) |
| EGFR-1486 21 nt Target: | 5′-UGCUGAUUCAGGCUUGGCCUG-3′ | (SEQ ID NO: 2675) |
| EGFR-1487 21 nt Target: | 5′-GCUGAUUCAGGCUUGGCCUGA-3′ | (SEQ ID NO: 2676) |
| EGFR-1561 21 nt Target: | 5′-CCAAGCAACAUGGUCAGUUUU-3′ | (SEQ ID NO: 2677) |
| EGFR-1562 21 nt Target: | 5′-CAAGCAACAUGGUCAGUUUUC-3′ | (SEQ ID NO: 2678) |
| EGFR-1563 21 nt Target: | 5′-AAGCAACAUGGUCAGUUUUCU-3′ | (SEQ ID NO: 2679) |
| EGFR-1691 21 nt Target: | 5′-UACAAUAAACUGGAAAAAACU-3′ | (SEQ ID NO: 2680) |
| EGFR-1963 21 nt Target: | 5′-CUCAGGCCAUGAACAUCACCU-3′ | (SEQ ID NO: 2681) |
| EGFR-1964 21 nt Target: | 5′-UCAGGCCAUGAACAUCACCUG-3′ | (SEQ ID NO: 2682) |
| EGFR-2008 21 nt Target: | 5′-GUAUCCAGUGUGCCCACUACA-3′ | (SEQ ID NO: 2683) |
| EGFR-2009 21 nt Target: | 5′-UAUCCAGUGUGCCCACUACAU-3′ | (SEQ ID NO: 2684) |
| EGFR-2010 21 nt Target: | 5′-AUCCAGUGUGCCCACUACAUU-3′ | (SEQ ID NO: 2685) |
| EGFR-2011 21 nt Target: | 5′-UCCAGUGUGCCCACUACAUUG-3′ | (SEQ ID NO: 2686) |
| EGFR-2012 21 nt Target: | 5′-CCAGUGUGCCCACUACAUUGA-3′ | (SEQ ID NO: 2687) |
| EGFR-2401 21 nt Target: | 5′-CUGAAUUCAAAAAGAUCAAAG-3′ | (SEQ ID NO: 2688) |
| EGFR-2402 21 nt Target: | 5′-UGAAUUCAAAAAGAUCAAAGU-3′ | (SEQ ID NO: 2689) |
| EGFR-2458 21 nt Target: | 5′-GACUCUGGAUCCCAGAAGGUG-3′ | (SEQ ID NO: 2690) |
| EGFR-2459 21 nt Target: | 5′-ACUCUGGAUCCCAGAAGGUGA-3′ | (SEQ ID NO: 2691) |
| EGFR-2460 21 nt Target: | 5′-CUCUGGAUCCCAGAAGGUGAG-3′ | (SEQ ID NO: 2692) |
| EGFR-2461 21 nt Target: | 5′-UCUGGAUCCCAGAAGGUGAGA-3′ | (SEQ ID NO: 2693) |
| EGFR-2462 21 nt Target: | 5′-CUGGAUCCCAGAAGGUGAGAA-3′ | (SEQ ID NO: 2694) |
| EGFR-2463 21 nt Target: | 5′-UGGAUCCCAGAAGGUGAGAAA-3′ | (SEQ ID NO: 2695) |
| EGFR-2464 21 nt Target: | 5′-GGAUCCCAGAAGGUGAGAAAG-3′ | (SEQ ID NO: 2696) |
| EGFR-2465 21 nt Target: | 5′-GAUCCCAGAAGGUGAGAAAGU-3′ | (SEQ ID NO: 2697) |
| EGFR-2815 21 nt Target: | 5′-CGCAGCAUGUCAAGAUCACAG-3′ | (SEQ ID NO: 2698) |
| EGFR-2816 21 nt Target: | 5′-GCAGCAUGUCAAGAUCACAGA-3′ | (SEQ ID NO: 2699) |
| EGFR-2817 21 nt Target: | 5′-CAGCAUGUCAAGAUCACAGAU-3′ | (SEQ ID NO: 2700) |
| EGFR-2818 21 nt Target: | 5′-AGCAUGUCAAGAUCACAGAUU-3′ | (SEQ ID NO: 2701) |
| EGFR-2819 21 nt Target: | 5′-GCAUGUCAAGAUCACAGAUUU-3′ | (SEQ ID NO: 2702) |
| EGFR-2820 21 nt Target: | 5′-CAUGUCAAGAUCACAGAUUUU-3′ | (SEQ ID NO: 2703) |
| EGFR-2821 21 nt Target: | 5′-AUGUCAAGAUCACAGAUUUUG-3′ | (SEQ ID NO: 2704) |
| EGFR-2822 21 nt Target: | 5′-UGUCAAGAUCACAGAUUUUGG-3′ | (SEQ ID NO: 2705) |
| EGFR-2823 21 nt Target: | 5′-GUCAAGAUCACAGAUUUUGGG-3′ | (SEQ ID NO: 2706) |
| EGFR-2824 21 nt Target: | 5′-UCAAGAUCACAGAUUUUGGGC-3′ | (SEQ ID NO: 2707) |
| EGFR-2825 21 nt Target: | 5′-CAAGAUCACAGAUUUUGGGCU-3′ | (SEQ ID NO: 2708) |
| EGFR-2826 21 nt Target: | 5′-AAGAUCACAGAUUUUGGGCUG-3′ | (SEQ ID NO: 2709) |
| EGFR-2827 21 nt Target: | 5′-AGAUCACAGAUUUUGGGCUGG-3′ | (SEQ ID NO: 2710) |
| EGFR-2828 21 nt Target: | 5′-GAUCACAGAUUUUGGGCUGGC-3′ | (SEQ ID NO: 2711) |
| EGFR-2829 21 nt Target: | 5′-AUCACAGAUUUUGGGCUGGCC-3′ | (SEQ ID NO: 2712) |
| EGFR-2830 21 nt Target: | 5′-UCACAGAUUUUGGGCUGGCCA-3′ | (SEQ ID NO: 2713) |
| EGFR-2831 21 nt Target: | 5′-CACAGAUUUUGGGCUGGCCAA-3′ | (SEQ ID NO: 2714) |
| EGFR-2832 21 nt Target: | 5′-ACAGAUUUUGGGCUGGCCAAA-3′ | (SEQ ID NO: 2715) |
| EGFR-2833 21 nt Target: | 5′-CAGAUUUUGGGCUGGCCAAAC-3′ | (SEQ ID NO: 2716) |
| EGFR-2834 21 nt Target: | 5′-AGAUUUUGGGCUGGCCAAACU-3′ | (SEQ ID NO: 2717) |
| EGFR-2835 21 nt Target: | 5′-GAUUUUGGGCUGGCCAAACUG-3′ | (SEQ ID NO: 2718) |
| EGFR-2836 21 nt Target: | 5′-AUUUUGGGCUGGCCAAACUGC-3′ | (SEQ ID NO: 2719) |
| EGFR-2837 21 nt Target: | 5′-UUUUGGGCUGGCCAAACUGCU-3′ | (SEQ ID NO: 2720) |
| EGFR-2891 21 nt Target: | 5′-AGGCAAAGUGCCUAUCAAGUG-3′ | (SEQ ID NO: 2721) |
| EGFR-2892 21 nt Target: | 5′-GGCAAAGUGCCUAUCAAGUGG-3′ | (SEQ ID NO: 2722) |
| EGFR-2893 21 nt Target: | 5′-GCAAAGUGCCUAUCAAGUGGA-3′ | (SEQ ID NO: 2723) |
| EGFR-2894 21 nt Target: | 5′-CAAAGUGCCUAUCAAGUGGAU-3′ | (SEQ ID NO: 2724) |
| EGFR-2895 21 nt Target: | 5′-AAAGUGCCUAUCAAGUGGAUG-3′ | (SEQ ID NO: 2725) |
| EGFR-2896 21 nt Target: | 5′-AAGUGCCUAUCAAGUGGAUGG-3′ | (SEQ ID NO: 2726) |
| EGFR-2897 21 nt Target: | 5′-AGUGCCUAUCAAGUGGAUGGC-3′ | (SEQ ID NO: 2727) |
| EGFR-3088 21 nt Target: | 5′-GUACCAUCGAUGUCUACAUGA-3′ | (SEQ ID NO: 2728) |
| EGFR-3089 21 nt Target: | 5′-UACCAUCGAUGUCUACAUGAU-3′ | (SEQ ID NO: 2729) |
| EGFR-3090 21 nt Target: | 5′-ACCAUCGAUGUCUACAUGAUC-3′ | (SEQ ID NO: 2730) |
| EGFR-3091 21 nt Target: | 5′-CCAUCGAUGUCUACAUGAUCA-3′ | (SEQ ID NO: 2731) |
| EGFR-3092 21 nt Target: | 5′-CAUCGAUGUCUACAUGAUCAU-3′ | (SEQ ID NO: 2732) |
| EGFR-3093 21 nt Target: | 5′-AUCGAUGUCUACAUGAUCAUG-3′ | (SEQ ID NO: 2733) |
| EGFR-3094 21 nt Target: | 5′-UCGAUGUCUACAUGAUCAUGG-3′ | (SEQ ID NO: 2734) |
| EGFR-3095 21 nt Target: | 5′-CGAUGUCUACAUGAUCAUGGU-3′ | (SEQ ID NO: 2735) |
| EGFR-3096 21 nt Target: | 5′-GAUGUCUACAUGAUCAUGGUC-3′ | (SEQ ID NO: 2736) |
| EGFR-3097 21 nt Target: | 5′-AUGUCUACAUGAUCAUGGUCA-3′ | (SEQ ID NO: 2737) |
| EGFR-3098 21 nt Target: | 5′-UGUCUACAUGAUCAUGGUCAA-3′ | (SEQ ID NO: 2738) |
| EGFR-3099 21 nt Target: | 5′-GUCUACAUGAUCAUGGUCAAG-3′ | (SEQ ID NO: 2739) |
| EGFR-3100 21 nt Target: | 5′-UCUACAUGAUCAUGGUCAAGU-3′ | (SEQ ID NO: 2740) |
| EGFR-3101 21 nt Target: | 5′-CUACAUGAUCAUGGUCAAGUG-3′ | (SEQ ID NO: 2741) |
| EGFR-3102 21 nt Target: | 5′-UACAUGAUCAUGGUCAAGUGC-3′ | (SEQ ID NO: 2742) |
| EGFR-3103 21 nt Target: | 5′-ACAUGAUCAUGGUCAAGUGCU-3′ | (SEQ ID NO: 2743) |
| EGFR-3104 21 nt Target: | 5′-CAUGAUCAUGGUCAAGUGCUG-3′ | (SEQ ID NO: 2744) |
| EGFR-3105 21 nt Target: | 5′-AUGAUCAUGGUCAAGUGCUGG-3′ | (SEQ ID NO: 2745) |
| EGFR-3106 21 nt Target: | 5′-UGAUCAUGGUCAAGUGCUGGA-3′ | (SEQ ID NO: 2746) |
| EGFR-3107 21 nt Target: | 5′-GAUCAUGGUCAAGUGCUGGAU-3′ | (SEQ ID NO: 2747) |
| EGFR-3108 21 nt Target: | 5′-AUCAUGGUCAAGUGCUGGAUG-3′ | (SEQ ID NO: 2748) |
| EGFR-3109 21 nt Target: | 5′-UCAUGGUCAAGUGCUGGAUGA-3′ | (SEQ ID NO: 2749) |
| EGFR-3110 21 nt Target: | 5′-CAUGGUCAAGUGCUGGAUGAU-3′ | (SEQ ID NO: 2750) |
| EGFR-3111 21 nt Target: | 5′-AUGGUCAAGUGCUGGAUGAUA-3′ | (SEQ ID NO: 2751) |
| EGFR-3112 21 nt Target: | 5′-UGGUCAAGUGCUGGAUGAUAG-3′ | (SEQ ID NO: 2752) |
| EGFR-3113 21 nt Target: | 5′-GGUCAAGUGCUGGAUGAUAGA-3′ | (SEQ ID NO: 2753) |
| EGFR-3169 21 nt Target: | 5′-UCGAAUUCUCCAAAAUGGCCC-3′ | (SEQ ID NO: 2754) |
| EGFR-3170 21 nt Target: | 5′-CGAAUUCUCCAAAAUGGCCCG-3′ | (SEQ ID NO: 2755) |
| EGFR-3220 21 nt Target: | 5′-GGGAUGAAAGAAUGCAUUUGC-3′ | (SEQ ID NO: 2756) |
| EGFR-3221 21 nt Target: | 5′-GGAUGAAAGAAUGCAUUUGCC-3′ | (SEQ ID NO: 2757) |
| EGFR-3222 21 nt Target: | 5′-GAUGAAAGAAUGCAUUUGCCA-3′ | (SEQ ID NO: 2758) |
| EGFR-3223 21 nt Target: | 5′-AUGAAAGAAUGCAUUUGCCAA-3′ | (SEQ ID NO: 2759) |
| EGFR-3224 21 nt Target: | 5′-UGAAAGAAUGCAUUUGCCAAG-3′ | (SEQ ID NO: 2760) |
| EGFR-3772 21 nt Target: | 5′-UGGACAACCCUGACUACCAGC-3′ | (SEQ ID NO: 2761) |
| EGFR-3773 21 nt Target: | 5′-GGACAACCCUGACUACCAGCA-3′ | (SEQ ID NO: 2762) |
| EGFR-3774 21 nt Target: | 5′-GACAACCCUGACUACCAGCAG-3′ | (SEQ ID NO: 2763) |
| EGFR-3775 21 nt Target: | 5′-ACAACCCUGACUACCAGCAGG-3′ | (SEQ ID NO: 2764) |
| EGFR-3776 21 nt Target: | 5′-CAACCCUGACUACCAGCAGGA-3′ | (SEQ ID NO: 2765) |
| EGFR-3777 21 nt Target: | 5′-AACCCUGACUACCAGCAGGAC-3′ | (SEQ ID NO: 2766) |
| EGFR-3778 21 nt Target: | 5′-ACCCUGACUACCAGCAGGACU-3′ | (SEQ ID NO: 2767) |
| EGFR-3779 21 nt Target: | 5′-CCCUGACUACCAGCAGGACUU-3′ | (SEQ ID NO: 2768) |

COMPONENT 19 NUCLEOTIDE TARGET mRNA SEQUENCES

| | | |
|---|---|---|
| EGFR-31 19 nt Target #1: | 5′-CGCAGCGCGGCCGCAGCAG-3′ | (SEQ ID NO: 2769) |
| EGFR-31 19 nt Target #2: | 5′-GCGCAGCGCGGCCGCAGCA-3′ | (SEQ ID NO: 3029) |
| EGFR-31 19 nt Target #3: | 5′-GGCGCAGCGCGGCCGCAGC-3′ | (SEQ ID NO: 3289) |
| EGFR-32 19 nt Target #1: | 5′-GCAGCGCGGCCGCAGCAGC-3′ | (SEQ ID NO: 2770) |
| EGFR-32 19 nt Target #2: | 5′-CGCAGCGCGGCCGCAGCAG-3′ | (SEQ ID NO: 3030) |
| EGFR-32 19 nt Target #3: | 5′-GCGCAGCGCGGCCGCAGCA-3′ | (SEQ ID NO: 3290) |
| EGFR-34 19 nt Target #1: | 5′-AGCGCGGCCGCAGCAGCCU-3′ | (SEQ ID NO: 2771) |
| EGFR-34 19 nt Target #2: | 5′-CAGCGCGGCCGCAGCAGCC-3′ | (SEQ ID NO: 3031) |
| EGFR-34 19 nt Target #3: | 5′-GCAGCGCGGCCGCAGCAGC-3′ | (SEQ ID NO: 3291) |
| EGFR-298 19 nt Target #1: | 5′-GCGCUCCUGGCGCUGCUGG-3′ | (SEQ ID NO: 2772) |
| EGFR-298 19 nt Target #2: | 5′-AGCGCUCCUGGCGCUGCUG-3′ | (SEQ ID NO: 3032) |
| EGFR-298 19 nt Target #3: | 5′-CAGCGCUCCUGGCGCUGCU-3′ | (SEQ ID NO: 3292) |
| EGFR-300 19 nt Target #1: | 5′-GCUCCUGGCGCUGCUGGCU-3′ | (SEQ ID NO: 2773) |
| EGFR-300 19 nt Target #2: | 5′-CGCUCCUGGCGCUGCUGGC-3′ | (SEQ ID NO: 3033) |
| EGFR-300 19 nt Target #3: | 5′-GCGCUCCUGGCGCUGCUGG-3′ | (SEQ ID NO: 3293) |
| EGFR-302 19 nt Target #1: | 5′-UCCUGGCGCUGCUGGCUGC-3′ | (SEQ ID NO: 2774) |
| EGFR-302 19 nt Target #2: | 5′-CUCCUGGCGCUGCUGGCUG-3′ | (SEQ ID NO: 3034) |
| EGFR-302 19 nt Target #3: | 5′-GCUCCUGGCGCUGCUGGCU-3′ | (SEQ ID NO: 3294) |
| EGFR-390 19 nt Target #1: | 5′-GUUGGGCACUUUUGAAGAU-3′ | (SEQ ID NO: 2775) |
| EGFR-390 19 nt Target #2: | 5′-AGUUGGGCACUUUUGAAGA-3′ | (SEQ ID NO: 3035) |
| EGFR-390 19 nt Target #3: | 5′-CAGUUGGGCACUUUUGAAG-3′ | (SEQ ID NO: 3295) |
| EGFR-458 19 nt Target #1: | 5′-GGAAUUUGGAAAUUACCUA-3′ | (SEQ ID NO: 2776) |
| EGFR-458 19 nt Target #2: | 5′-GGGAAUUUGGAAAUUACCU-3′ | (SEQ ID NO: 3036) |
| EGFR-458 19 nt Target #3: | 5′-UGGGAAUUUGGAAAUUACC-3′ | (SEQ ID NO: 3296) |
| EGFR-489 19 nt Target #1: | 5′-UUAUGAUCUUUCCUUCUUA-3′ | (SEQ ID NO: 2777) |
| EGFR-489 19 nt Target #2: | 5′-AUUAUGAUCUUUCCUUCUU-3′ | (SEQ ID NO: 3037) |
| EGFR-489 19 nt Target #3: | 5′-AAUUAUGAUCUUUCCUUCU-3′ | (SEQ ID NO: 3297) |
| EGFR-525 19 nt Target #1: | 5′-GGCUGGUUAUGUCCUCAUU-3′ | (SEQ ID NO: 2778) |
| EGFR-525 19 nt Target #2: | 5′-UGGCUGGUUAUGUCCUCAU-3′ | (SEQ ID NO: 3038) |
| EGFR-525 19 nt Target #3: | 5′-GUGGCUGGUUAUGUCCUCA-3′ | (SEQ ID NO: 3298) |
| EGFR-676 19 nt Target #1: | 5′-CCCAUGAGAAAUUUACAGG-3′ | (SEQ ID NO: 2779) |
| EGFR-676 19 nt Target #2: | 5′-GCCCAUGAGAAAUUUACAG-3′ | (SEQ ID NO: 3039) |
| EGFR-676 19 nt Target #3: | 5′-UGCCCAUGAGAAAUUUACA-3′ | (SEQ ID NO: 3299) |
| EGFR-701 19 nt Target #1: | 5′-UGCAUGGCGCCGUGCGGUU-3′ | (SEQ ID NO: 2780) |
| EGFR-701 19 nt Target #2: | 5′-CUGCAUGGCGCCGUGCGGU-3′ | (SEQ ID NO: 3040) |
| EGFR-701 19 nt Target #3: | 5′-CCUGCAUGGCGCCGUGCGG-3′ | (SEQ ID NO: 3300) |
| EGFR-707 19 nt Target #1: | 5′-GCGCCGUGCGGUUCAGCAA-3′ | (SEQ ID NO: 2781) |
| EGFR-707 19 nt Target #2: | 5′-GGCGCCGUGCGGUUCAGCA-3′ | (SEQ ID NO: 3041) |
| EGFR-707 19 nt Target #3: | 5′-UGGCGCCGUGCGGUUCAGC-3′ | (SEQ ID NO: 3301) |
| EGFR-707 19 nt Target #1: | 5′-GCGCCGUGCGGUUCAGCAA-3′ | (SEQ ID NO: 2782) |
| EGFR-707 19 nt Target #2: | 5′-GGCGCCGUGCGGUUCAGCA-3′ | (SEQ ID NO: 3042) |
| EGFR-707 19 nt Target #3: | 5′-UGGCGCCGUGCGGUUCAGC-3′ | (SEQ ID NO: 3302) |
| EGFR-709 19 nt Target #1: | 5′-GCCGUGCGGUUCAGCAACA-3′ | (SEQ ID NO: 2783) |
| EGFR-709 19 nt Target #2: | 5′-CGCCGUGCGGUUCAGCAAC-3′ | (SEQ ID NO: 3043) |
| EGFR-709 19 nt Target #3: | 5′-GCGCCGUGCGGUUCAGCAA-3′ | (SEQ ID NO: 3303) |
| EGFR-710 19 nt Target #1: | 5′-CCGUGCGGUUCAGCAACAA-3′ | (SEQ ID NO: 2784) |
| EGFR-710 19 nt Target #2: | 5′-GCCGUGCGGUUCAGCAACA-3′ | (SEQ ID NO: 3044) |
| EGFR-710 19 nt Target #3: | 5′-CGCCGUGCGGUUCAGCAAC-3′ | (SEQ ID NO: 3304) |
| EGFR-827 19 nt Target #1: | 5′-GCUGCCAAAAGUGUGAUCC-3′ | (SEQ ID NO: 2785) |
| EGFR-827 19 nt Target #2: | 5′-AGCUGCCAAAAGUGUGAUC-3′ | (SEQ ID NO: 3045) |
| EGFR-827 19 nt Target #3: | 5′-CAGCUGCCAAAAGUGUGAU-3′ | (SEQ ID NO: 3305) |
| EGFR-912 19 nt Target #1: | 5′-CUGUGCCCAGCAGUGCUCC-3′ | (SEQ ID NO: 2786) |
| EGFR-912 19 nt Target #2: | 5′-UCUGUGCCCAGCAGUGCUC-3′ | (SEQ ID NO: 3046) |
| EGFR-912 19 nt Target #3: | 5′-AUCUGUGCCCAGCAGUGCU-3′ | (SEQ ID NO: 3306) |
| EGFR-914 19 nt Target #1: | 5′-GUGCCCAGCAGUGCUCCGG-3′ | (SEQ ID NO: 2787) |
| EGFR-914 19 nt Target #2: | 5′-UGUGCCCAGCAGUGCUCCG-3′ | (SEQ ID NO: 3047) |
| EGFR-914 19 nt Target #3: | 5′-CUGUGCCCAGCAGUGCUCC-3′ | (SEQ ID NO: 3307) |
| EGFR-926 19 nt Target #1: | 5′-GCUCCGGGCGCUGCCGUGG-3′ | (SEQ ID NO: 2788) |
| EGFR-926 19 nt Target #2: | 5′-UGCUCCGGGCGCUGCCGUG-3′ | (SEQ ID NO: 3048) |
| EGFR-926 19 nt Target #3: | 5′-GUGCUCCGGGCGCUGCCGU-3′ | (SEQ ID NO: 3308) |
| EGFR-1005 19 nt Target #1: | 5′-GAGCGACUGCCUGGUCUGC-3′ | (SEQ ID NO: 2789) |
| EGFR-1005 19 nt Target #2: | 5′-AGAGCGACUGCCUGGUCUG-3′ | (SEQ ID NO: 3049) |
| EGFR-1005 19 nt Target #3: | 5′-GAGAGCGACUGCCUGGUCU-3′ | (SEQ ID NO: 3309) |
| EGFR-1013 19 nt Target #1: | 5′-GCCUGGUCUGCCGCAAAUU-3′ | (SEQ ID NO: 2790) |
| EGFR-1013 19 nt Target #2: | 5′-UGCCUGGUCUGCCGCAAAU-3′ | (SEQ ID NO: 3050) |
| EGFR-1013 19 nt Target #3: | 5′-CUGCCUGGUCUGCCGCAAA-3′ | (SEQ ID NO: 3310) |
| EGFR-1175 19 nt Target #1: | 5′-CAGAUCACGGCUCGUGCGU-3′ | (SEQ ID NO: 2791) |
| EGFR-1175 19 nt Target #2: | 5′-ACAGAUCACGGCUCGUGCG-3′ | (SEQ ID NO: 3051) |
| EGFR-1175 19 nt Target #3: | 5′-GACAGAUCACGGCUCGUGC-3′ | (SEQ ID NO: 3311) |
| EGFR-1271 19 nt Target #1: | 5′-GCAAAGUGUGUAACGGAAU-3′ | (SEQ ID NO: 2792) |
| EGFR-1271 19 nt Target #2: | 5′-CGCAAAGUGUGUAACGGAA-3′ | (SEQ ID NO: 3052) |
| EGFR-1271 19 nt Target #3: | 5′-CCGCAAAGUGUGUAACGGA-3′ | (SEQ ID NO: 3312) |
| EGFR-1286 19 nt Target #1: | 5′-GAAUAGGUAUUGGUGAAUU-3′ | (SEQ ID NO: 2793) |
| EGFR-1286 19 nt Target #2: | 5′-GGAAUAGGUAUUGGUGAAU-3′ | (SEQ ID NO: 3053) |
| EGFR-1286 19 nt Target #3: | 5′-CGGAAUAGGUAUUGGUGAA-3′ | (SEQ ID NO: 3313) |
| EGFR-1330 19 nt Target #1: | 5′-ACGAAUAUUAAACACUUCA-3′ | (SEQ ID NO: 2794) |
| EGFR-1330 19 nt Target #2: | 5′-UACGAAUAUUAAACACUUC-3′ | (SEQ ID NO: 3054) |
| EGFR-1330 19 nt Target #3: | 5′-CUACGAAUAUUAAACACUU-3′ | (SEQ ID NO: 3314) |
| EGFR-1437 19 nt Target #1: | 5′-ACAGGAACUGGAUAUUCUG-3′ | (SEQ ID NO: 2795) |
| EGFR-1437 19 nt Target #2: | 5′-CACAGGAACUGGAUAUUCU-3′ | (SEQ ID NO: 3055) |
| EGFR-1437 19 nt Target #3: | 5′-CCACAGGAACUGGAUAUUC-3′ | (SEQ ID NO: 3315) |
| EGFR-1475 19 nt Target #1: | 5′-CAGGGUUUUUGCUGAUUCA-3′ | (SEQ ID NO: 2796) |
| EGFR-1475 19 nt Target #2: | 5′-ACAGGGUUUUUGCUGAUUC-3′ | (SEQ ID NO: 3056) |
| EGFR-1475 19 nt Target #3: | 5′-CACAGGGUUUUUGCUGAUU-3′ | (SEQ ID NO: 3316) |
| EGFR-1661 19 nt Target #1: | 5′-CAGGAAACAAAAAUUUGUG-3′ | (SEQ ID NO: 2797) |
| EGFR-1661 19 nt Target #2: | 5′-UCAGGAAACAAAAAUUUGU-3′ | (SEQ ID NO: 3057) |
| EGFR-1661 19 nt Target #3: | 5′-UUCAGGAAACAAAAAUUUG-3′ | (SEQ ID NO: 3317) |
| EGFR-1679 19 nt Target #1: | 5′-GCUAUGCAAAUACAAUAAA-3′ | (SEQ ID NO: 2798) |
| EGFR-1679 19 nt Target #2: | 5′-UGCUAUGCAAAUACAAUAA-3′ | (SEQ ID NO: 3058) |
| EGFR-1679 19 nt Target #3: | 5′-GUGCUAUGCAAAUACAAUA-3′ | (SEQ ID NO: 3318) |
| EGFR-1723 19 nt Target #1: | 5′-GGUCAGAAAACCAAAAUUA-3′ | (SEQ ID NO: 2799) |
| EGFR-1723 19 nt Target #2: | 5′-CGGUCAGAAAACCAAAAUU-3′ | (SEQ ID NO: 3059) |
| EGFR-1723 19 nt Target #3: | 5′-CCGGUCAGAAAACCAAAAU-3′ | (SEQ ID NO: 3319) |
| EGFR-1838 19 nt Target #1: | 5′-GCGUCUCUUGCCGGAAUGU-3′ | (SEQ ID NO: 2800) |
| EGFR-1838 19 nt Target #2: | 5′-UGCGUCUCUUGCCGGAAUG-3′ | (SEQ ID NO: 3060) |
| EGFR-1838 19 nt Target #3: | 5′-CUGCGUCUCUUGCCGGAAU-3′ | (SEQ ID NO: 3320) |
| EGFR-2227 19 nt Target #1: | 5′-GCCCUCCUCUUGCUGCUGG-3′ | (SEQ ID NO: 2801) |
| EGFR-2227 19 nt Target #2: | 5′-GGCCCUCCUCUUGCUGCUG-3′ | (SEQ ID NO: 3061) |
| EGFR-2227 19 nt Target #3: | 5′-GGGCCCUCCUCUUGCUGCU-3′ | (SEQ ID NO: 3321) |
| EGFR-2228 19 nt Target #1: | 5′-CCCUCCUCUUGCUGCUGGU-3′ | (SEQ ID NO: 2802) |
| EGFR-2228 19 nt Target #2: | 5′-GCCCUCCUCUUGCUGCUGG-3′ | (SEQ ID NO: 3062) |
| EGFR-2228 19 nt Target #3: | 5′-GGCCCUCCUCUUGCUGCUG-3′ | (SEQ ID NO: 3322) |
| EGFR-2232 19 nt Target #1: | 5′-CCUCUUGCUGCUGGUGGUG-3′ | (SEQ ID NO: 2803) |
| EGFR-2232 19 nt Target #2: | 5′-UCCUCUUGCUGCUGGUGGU-3′ | (SEQ ID NO: 3063) |
| EGFR-2232 19 nt Target #3: | 5′-CUCCUCUUGCUGCUGGUGG-3′ | (SEQ ID NO: 3323) |
| EGFR-2233 19 nt Target #1: | 5′-CUCUUGCUGCUGGUGGUGG-3′ | (SEQ ID NO: 2804) |
| EGFR-2233 19 nt Target #2: | 5′-CCUCUUGCUGCUGGUGGUG-3′ | (SEQ ID NO: 3064) |
| EGFR-2233 19 nt Target #3: | 5′-UCCUCUUGCUGCUGGUGGU-3′ | (SEQ ID NO: 3324) |
| EGFR-2295 19 nt Target #1: | 5′-GAAGCGCACGCUGCGGAGG-3′ | (SEQ ID NO: 2805) |
| EGFR-2295 19 nt Target #2: | 5′-GGAAGCGCACGCUGCGGAG-3′ | (SEQ ID NO: 3065) |
| EGFR-2295 19 nt Target #3: | 5′-CGGAAGCGCACGCUGCGGA-3′ | (SEQ ID NO: 3325) |
| EGFR-2298 19 nt Target #1: | 5′-GCGCACGCUGCGGAGGCUG-3′ | (SEQ ID NO: 2806) |
| EGFR-2298 19 nt Target #2: | 5′-AGCGCACGCUGCGGAGGCU-3′ | (SEQ ID NO: 3066) |
| EGFR-2298 19 nt Target #3: | 5′-AAGCGCACGCUGCGGAGGC-3′ | (SEQ ID NO: 3326) |
| EGFR-2399 19 nt Target #1: | 5′-CUGAAUUCAAAAAGAUCAA-3′ | (SEQ ID NO: 2807) |
| EGFR-2399 19 nt Target #2: | 5′-ACUGAAUUCAAAAAGAUCA-3′ | (SEQ ID NO: 3067) |
| EGFR-2399 19 nt Target #3: | 5′-AACUGAAUUCAAAAAGAUC-3′ | (SEQ ID NO: 3327) |
| EGFR-2417 19 nt Target #1: | 5′-AAGUGCUGGGCUCCGGUGC-3′ | (SEQ ID NO: 2808) |
| EGFR-2417 19 nt Target #2: | 5′-AAAGUGCUGGGCUCCGGUG-3′ | (SEQ ID NO: 3068) |
| EGFR-2417 19 nt Target #3: | 5′-CAAAGUGCUGGGCUCCGGU-3′ | (SEQ ID NO: 3328) |
| EGFR-2419 19 nt Target #1: | 5′-GUGCUGGGCUCCGGUGCGU-3′ | (SEQ ID NO: 2809) |
| EGFR-2419 19 nt Target #2: | 5′-AGUGCUGGGCUCCGGUGCG-3′ | (SEQ ID NO: 3069) |
| EGFR-2419 19 nt Target #3: | 5′-AAGUGCUGGGCUCCGGUGC-3′ | (SEQ ID NO: 3329) |
| EGFR-2420 19 nt Target #1: | 5′-UGCUGGGCUCCGGUGCGUU-3′ | (SEQ ID NO: 2810) |
| EGFR-2420 19 nt Target #2: | 5′-GUGCUGGGCUCCGGUGCGU-3′ | (SEQ ID NO: 3070) |
| EGFR-2420 19 nt Target #3: | 5′-AGUGCUGGGCUCCGGUGCG-3′ | (SEQ ID NO: 3330) |
| EGFR-2421 19 nt Target #1: | 5′-GCUGGGCUCCGGUGCGUUC-3′ | (SEQ ID NO: 2811) |
| EGFR-2421 19 nt Target #2: | 5′-UGCUGGGCUCCGGUGCGUU-3′ | (SEQ ID NO: 3071) |
| EGFR-2421 19 nt Target #3: | 5′-GUGCUGGGCUCCGGUGCGU-3′ | (SEQ ID NO: 3331) |
| EGFR-2422 19 nt Target #1: | 5′-CUGGGCUCCGGUGCGUUCG-3′ | (SEQ ID NO: 2812) |
| EGFR-2422 19 nt Target #2: | 5′-GCUGGGCUCCGGUGCGUUC-3′ | (SEQ ID NO: 3072) |
| EGFR-2422 19 nt Target #3: | 5′-UGCUGGGCUCCGGUGCGUU-3′ | (SEQ ID NO: 3332) |
| EGFR-2591 19 nt Target #1: | 5′-UGUGCCGCCUGCUGGGCAU-3′ | (SEQ ID NO: 2813) |
| EGFR-2591 19 nt Target #2: | 5′-GUGUGCCGCCUGCUGGGCA-3′ | (SEQ ID NO: 3073) |
| EGFR-2591 19 nt Target #3: | 5′-CGUGUGCCGCCUGCUGGGC-3′ | (SEQ ID NO: 3333) |
| EGFR-2592 19 nt Target #1: | 5′-GUGCCGCCUGCUGGGCAUC-3′ | (SEQ ID NO: 2814) |
| EGFR-2592 19 nt Target #2: | 5′-UGUGCCGCCUGCUGGGCAU-3′ | (SEQ ID NO: 3074) |
| EGFR-2592 19 nt Target #3: | 5′-GUGUGCCGCCUGCUGGGCA-3′ | (SEQ ID NO: 3334) |
| EGFR-2594 19 nt Target #1: | 5′-GCCGCCUGCUGGGCAUCUG-3′ | (SEQ ID NO: 2815) |
| EGFR-2594 19 nt Target #2: | 5′-UGCCGCCUGCUGGGCAUCU-3′ | (SEQ ID NO: 3075) |
| EGFR-2594 19 nt Target #3: | 5′-GUGCCGCCUGCUGGGCAUC-3′ | (SEQ ID NO: 3335) |
| EGFR-2624 19 nt Target #1: | 5′-CCGUGCAGCUCAUCACGCA-3′ | (SEQ ID NO: 2816) |
| EGFR-2624 19 nt Target #2: | 5′-ACCGUGCAGCUCAUCACGC-3′ | (SEQ ID NO: 3076) |
| EGFR-2624 19 nt Target #3: | 5′-CACCGUGCAGCUCAUCACG-3′ | (SEQ ID NO: 3336) |
| EGFR-2627 19 nt Target #1: | 5′-UGCAGCUCAUCACGCAGCU-3′ | (SEQ ID NO: 2817) |
| EGFR-2627 19 nt Target #2: | 5′-GUGCAGCUCAUCACGCAGC-3′ | (SEQ ID NO: 3077) |
| EGFR-2627 19 nt Target #3: | 5′-CGUGCAGCUCAUCACGCAG-3′ | (SEQ ID NO: 3337) |
| EGFR-2631 19 nt Target #1: | 5′-GCUCAUCACGCAGCUCAUG-3′ | (SEQ ID NO: 2818) |
| EGFR-2631 19 nt Target #2: | 5′-AGCUCAUCACGCAGCUCAU-3′ | (SEQ ID NO: 3078) |
| EGFR-2631 19 nt Target #3: | 5′-CAGCUCAUCACGCAGCUCA-3′ | (SEQ ID NO: 3338) |
| EGFR-2632 19 nt Target #1: | 5′-CUCAUCACGCAGCUCAUGC-3′ | (SEQ ID NO: 2819) |
| EGFR-2632 19 nt Target #2: | 5′-GCUCAUCACGCAGCUCAUG-3′ | (SEQ ID NO: 3079) |
| EGFR-2632 19 nt Target #3: | 5′-AGCUCAUCACGCAGCUCAU-3′ | (SEQ ID NO: 3339) |
| EGFR-2643 19 nt Target #1: | 5′-GCUCAUGCCCUUCGGCUGC-3′ | (SEQ ID NO: 2820) |
| EGFR-2643 19 nt Target #2: | 5′-AGCUCAUGCCCUUCGGCUG-3′ | (SEQ ID NO: 3080) |
| EGFR-2643 19 nt Target #3: | 5′-CAGCUCAUGCCCUUCGGCU-3′ | (SEQ ID NO: 3340) |
| EGFR-2644 19 nt Target #1: | 5′-CUCAUGCCCUUCGGCUGCC-3′ | (SEQ ID NO: 2821) |
| EGFR-2644 19 nt Target #2: | 5′-GCUCAUGCCCUUCGGCUGC-3′ | (SEQ ID NO: 3081) |
| EGFR-2644 19 nt Target #3: | 5′-AGCUCAUGCCCUUCGGCUG-3′ | (SEQ ID NO: 3341) |
| EGFR-2754 19 nt Target #1: | 5′-GGAGGACCGUCGCUUGGUG-3′ | (SEQ ID NO: 2822) |
| EGFR-2754 19 nt Target #2: | 5′-UGGAGGACCGUCGCUUGGU-3′ | (SEQ ID NO: 3082) |
| EGFR-2754 19 nt Target #3: | 5′-UUGGAGGACCGUCGCUUGG-3′ | (SEQ ID NO: 3342) |
| EGFR-2756 19 nt Target #1: | 5′-AGGACCGUCGCUUGGUGCA-3′ | (SEQ ID NO: 2823) |
| EGFR-2756 19 nt Target #2: | 5′-GAGGACCGUCGCUUGGUGC-3′ | (SEQ ID NO: 3083) |
| EGFR-2756 19 nt Target #3: | 5′-GGAGGACCGUCGCUUGGUG-3′ | (SEQ ID NO: 3343) |
| EGFR-2757 19 nt Target #1: | 5′-GGACCGUCGCUUGGUGCAC-3′ | (SEQ ID NO: 2824) |
| EGFR-2757 19 nt Target #2: | 5′-AGGACCGUCGCUUGGUGCA-3′ | (SEQ ID NO: 3084) |
| EGFR-2757 19 nt Target #3: | 5′-GAGGACCGUCGCUUGGUGC-3′ | (SEQ ID NO: 3344) |
| EGFR-2758 19 nt Target #1: | 5′-GACCGUCGCUUGGUGCACC-3′ | (SEQ ID NO: 2825) |
| EGFR-2758 19 nt Target #2: | 5′-GGACCGUCGCUUGGUGCAC-3′ | (SEQ ID NO: 3085) |
| EGFR-2758 19 nt Target #3: | 5′-AGGACCGUCGCUUGGUGCA-3′ | (SEQ ID NO: 3345) |
| EGFR-2760 19 nt Target #1: | 5′-CCGUCGCUUGGUGCACCGC-3′ | (SEQ ID NO: 2826) |
| EGFR-2760 19 nt Target #2: | 5′-ACCGUCGCUUGGUGCACCG-3′ | (SEQ ID NO: 3086) |
| EGFR-2760 19 nt Target #3: | 5′-GACCGUCGCUUGGUGCACC-3′ | (SEQ ID NO: 3346) |
| EGFR-2762 19 nt Target #1: | 5′-GUCGCUUGGUGCACCGCGA-3′ | (SEQ ID NO: 2827) |
| EGFR-2762 19 nt Target #2: | 5′-CGUCGCUUGGUGCACCGCG-3′ | (SEQ ID NO: 3087) |
| EGFR-2762 19 nt Target #3: | 5′-CCGUCGCUUGGUGCACCGC-3′ | (SEQ ID NO: 3347) |
| EGFR-2764 19 nt Target #1: | 5′-CGCUUGGUGCACCGCGACC-3′ | (SEQ ID NO: 2828) |
| EGFR-2764 19 nt Target #2: | 5′-UCGCUUGGUGCACCGCGAC-3′ | (SEQ ID NO: 3088) |
| EGFR-2764 19 nt Target #3: | 5′-GUCGCUUGGUGCACCGCGA-3′ | (SEQ ID NO: 3348) |
| EGFR-2765 19 nt Target #1: | 5′-GCUUGGUGCACCGCGACCU-3′ | (SEQ ID NO: 2829) |
| EGFR-2765 19 nt Target #2: | 5′-CGCUUGGUGCACCGCGACC-3′ | (SEQ ID NO: 3089) |
| EGFR-2765 19 nt Target #3: | 5′-UCGCUUGGUGCACCGCGAC-3′ | (SEQ ID NO: 3349) |
| EGFR-2767 19 nt Target #1: | 5′-UUGGUGCACCGCGACCUGG-3′ | (SEQ ID NO: 2830) |
| EGFR-2767 19 nt Target #2: | 5′-CUUGGUGCACCGCGACCUG-3′ | (SEQ ID NO: 3090) |
| EGFR-2767 19 nt Target #3: | 5′-GCUUGGUGCACCGCGACCU-3′ | (SEQ ID NO: 3350) |
| EGFR-2915 19 nt Target #1: | 5′-CAUUGGAAUCAAUUUUACA-3′ | (SEQ ID NO: 2831) |
| EGFR-2915 19 nt Target #2: | 5′-GCAUUGGAAUCAAUUUUAC-3′ | (SEQ ID NO: 3091) |
| EGFR-2915 19 nt Target #3: | 5′-GGCAUUGGAAUCAAUUUUA-3′ | (SEQ ID NO: 3351) |
| EGFR-3115 19 nt Target #1: | 5′-AAGUGCUGGAUGAUAGACG-3′ | (SEQ ID NO: 2832) |
| EGFR-3115 19 nt Target #2: | 5′-CAAGUGCUGGAUGAUAGAC-3′ | (SEQ ID NO: 3092) |
| EGFR-3115 19 nt Target #3: | 5′-UCAAGUGCUGGAUGAUAGA-3′ | (SEQ ID NO: 3352) |
| EGFR-3117 19 nt Target #1: | 5′-GUGCUGGAUGAUAGACGCA-3′ | (SEQ ID NO: 2833) |
| EGFR-3117 19 nt Target #2: | 5′-AGUGCUGGAUGAUAGACGC-3′ | (SEQ ID NO: 3093) |
| EGFR-3117 19 nt Target #3: | 5′-AAGUGCUGGAUGAUAGACG-3′ | (SEQ ID NO: 3353) |
| EGFR-3118 19 nt Target #1: | 5′-UGCUGGAUGAUAGACGCAG-3′ | (SEQ ID NO: 2834) |
| EGFR-3118 19 nt Target #2: | 5′-GUGCUGGAUGAUAGACGCA-3′ | (SEQ ID NO: 3094) |
| EGFR-3118 19 nt Target #3: | 5′-AGUGCUGGAUGAUAGACGC-3′ | (SEQ ID NO: 3354) |
| EGFR-3120 19 nt Target #1: | 5′-CUGGAUGAUAGACGCAGAU-3′ | (SEQ ID NO: 2835) |
| EGFR-3120 19 nt Target #2: | 5′-GCUGGAUGAUAGACGCAGA-3′ | (SEQ ID NO: 3095) |
| EGFR-3120 19 nt Target #3: | 5′-UGCUGGAUGAUAGACGCAG-3′ | (SEQ ID NO: 3355) |
| EGFR-3372 19 nt Target #1: | 5′-CCUGAGCUCUCUGAGUGCA-3′ | (SEQ ID NO: 2836) |
| EGFR-3372 19 nt Target #2: | 5′-UCCUGAGCUCUCUGAGUGC-3′ | (SEQ ID NO: 3096) |
| EGFR-3372 19 nt Target #3: | 5′-CUCCUGAGCUCUCUGAGUG-3′ | (SEQ ID NO: 3356) |
| EGFR-3375 19 nt Target #1: | 5′-GAGCUCUCUGAGUGCAACC-3′ | (SEQ ID NO: 2837) |
| EGFR-3375 19 nt Target #2: | 5′-UGAGCUCUCUGAGUGCAAC-3′ | (SEQ ID NO: 3097) |
| EGFR-3375 19 nt Target #3: | 5′-CUGAGCUCUCUGAGUGCAA-3′ | (SEQ ID NO: 3357) |
| EGFR-3440 19 nt Target #1: | 5′-GCUGUCCCAUCAAGGAAGA-3′ | (SEQ ID NO: 2838) |
| EGFR-3440 19 nt Target #2: | 5′-AGCUGUCCCAUCAAGGAAG-3′ | (SEQ ID NO: 3098) |
| EGFR-3440 19 nt Target #3: | 5′-AAGCUGUCCCAUCAAGGAA-3′ | (SEQ ID NO: 3358) |
| EGFR-3441 19 nt Target #1: | 5′-CUGUCCCAUCAAGGAAGAC-3′ | (SEQ ID NO: 2839) |
| EGFR-3441 19 nt Target #2: | 5′-GCUGUCCCAUCAAGGAAGA-3′ | (SEQ ID NO: 3099) |
| EGFR-3441 19 nt Target #3: | 5′-AGCUGUCCCAUCAAGGAAG-3′ | (SEQ ID NO: 3359) |
| EGFR-3457 19 nt Target #1: | 5′-GACAGCUUCUUGCAGCGAU-3′ | (SEQ ID NO: 2840) |
| EGFR-3457 19 nt Target #2: | 5′-AGACAGCUUCUUGCAGCGA-3′ | (SEQ ID NO: 3100) |
| EGFR-3457 19 nt Target #3: | 5′-AAGACAGCUUCUUGCAGCG-3′ | (SEQ ID NO: 3360) |
| EGFR-3458 19 nt Target #1: | 5′-ACAGCUUCUUGCAGCGAUA-3′ | (SEQ ID NO: 2841) |
| EGFR-3458 19 nt Target #2: | 5′-GACAGCUUCUUGCAGCGAU-3′ | (SEQ ID NO: 3101) |
| EGFR-3458 19 nt Target #3: | 5′-AGACAGCUUCUUGCAGCGA-3′ | (SEQ ID NO: 3361) |
| EGFR-3459 19 nt Target #1: | 5′-CAGCUUCUUGCAGCGAUAC-3′ | (SEQ ID NO: 2842) |
| EGFR-3459 19 nt Target #2: | 5′-ACAGCUUCUUGCAGCGAUA-3′ | (SEQ ID NO: 3102) |
| EGFR-3459 19 nt Target #3: | 5′-GACAGCUUCUUGCAGCGAU-3′ | (SEQ ID NO: 3362) |
| EGFR-3460 19 nt Target #1: | 5′-AGCUUCUUGCAGCGAUACA-3′ | (SEQ ID NO: 2843) |
| EGFR-3460 19 nt Target #2: | 5′-CAGCUUCUUGCAGCGAUAC-3′ | (SEQ ID NO: 3103) |
| EGFR-3460 19 nt Target #3: | 5′-ACAGCUUCUUGCAGCGAUA-3′ | (SEQ ID NO: 3363) |
| EGFR-3461 19 nt Target #1: | 5′-GCUUCUUGCAGCGAUACAG-3′ | (SEQ ID NO: 2844) |
| EGFR-3461 19 nt Target #2: | 5′-AGCUUCUUGCAGCGAUACA-3′ | (SEQ ID NO: 3104) |
| EGFR-3461 19 nt Target #3: | 5′-CAGCUUCUUGCAGCGAUAC-3′ | (SEQ ID NO: 3364) |
| EGFR-3463 19 nt Target #1: | 5′-UUCUUGCAGCGAUACAGCU-3′ | (SEQ ID NO: 2845) |
| EGFR-3463 19 nt Target #2: | 5′-CUUCUUGCAGCGAUACAGC-3′ | (SEQ ID NO: 3105) |
| EGFR-3463 19 nt Target #3: | 5′-GCUUCUUGCAGCGAUACAG-3′ | (SEQ ID NO: 3365) |
| EGFR-3876 19 nt Target #1: | 5′-ACAAAGCAGUGAAUUUAUU-3′ | (SEQ ID NO: 2846) |
| EGFR-3876 19 nt Target #2: | 5′-CACAAAGCAGUGAAUUUAU-3′ | (SEQ ID NO: 3106) |
| EGFR-3876 19 nt Target #3: | 5′-CCACAAAGCAGUGAAUUUA-3′ | (SEQ ID NO: 3366) |
| EGFR-4178 19 nt Target #1: | 5′-AUAUUUGAAAAAAAAAAAA-3′ | (SEQ ID NO: 2847) |
| EGFR-4178 19 nt Target #2: | 5′-UAUAUUUGAAAAAAAAAAA-3′ | (SEQ ID NO: 3107) |
| EGFR-4178 19 nt Target #3: | 5′-GUAUAUUUGAAAAAAAAAA-3′ | (SEQ ID NO: 3367) |
| EGFR-4205 19 nt Target #1: | 5′-UGAGGAUUUUUAUUGAUUG-3′ | (SEQ ID NO: 2848) |
| EGFR-4205 19 nt Target #2: | 5′-GUGAGGAUUUUUAUUGAUU-3′ | (SEQ ID NO: 3108) |
| EGFR-4205 19 nt Target #3: | 5′-UGUGAGGAUUUUUAUUGAU-3′ | (SEQ ID NO: 3368) |
| EGFR-4249 19 nt Target #1: | 5′-CUAUUGAUUUUUACUUCAA-3′ | (SEQ ID NO: 2849) |
| EGFR-4249 19 nt Target #2: | 5′-GCUAUUGAUUUUUACUUCA-3′ | (SEQ ID NO: 3109) |
| EGFR-4249 19 nt Target #3: | 5′-CGCUAUUGAUUUUUACUUC-3′ | (SEQ ID NO: 3369) |
| EGFR-4284 19 nt Target #1: | 5′-GGAAGAAGCUUGCUGGUAG-3′ | (SEQ ID NO: 2850) |
| EGFR-4284 19 nt Target #2: | 5′-AGGAAGAAGCUUGCUGGUA-3′ | (SEQ ID NO: 3110) |
| EGFR-4284 19 nt Target #3: | 5′-AAGGAAGAAGCUUGCUGGU-3′ | (SEQ ID NO: 3370) |
| EGFR-4285 19 nt Target #1: | 5′-GAAGAAGCUUGCUGGUAGC-3′ | (SEQ ID NO: 2851) |
| EGFR-4285 19 nt Target #2: | 5′-GGAAGAAGCUUGCUGGUAG-3′ | (SEQ ID NO: 3111) |
| EGFR-4285 19 nt Target #3: | 5′-AGGAAGAAGCUUGCUGGUA-3′ | (SEQ ID NO: 3371) |
| EGFR-4286 19 nt Target #1: | 5′-AAGAAGCUUGCUGGUAGCA-3′ | (SEQ ID NO: 2852) |
| EGFR-4286 19 nt Target #2: | 5′-GAAGAAGCUUGCUGGUAGC-3′ | (SEQ ID NO: 3112) |
| EGFR-4286 19 nt Target #3: | 5′-GGAAGAAGCUUGCUGGUAG-3′ | (SEQ ID NO: 3372) |
| EGFR-4287 19 nt Target #1: | 5′-AGAAGCUUGCUGGUAGCAC-3′ | (SEQ ID NO: 2853) |
| EGFR-4287 19 nt Target #2: | 5′-AAGAAGCUUGCUGGUAGCA-3′ | (SEQ ID NO: 3113) |
| EGFR-4287 19 nt Target #3: | 5′-GAAGAAGCUUGCUGGUAGC-3′ | (SEQ ID NO: 3373) |
| EGFR-4288 19 nt Target #1: | 5′-GAAGCUUGCUGGUAGCACU-3′ | (SEQ ID NO: 2854) |
| EGFR-4288 19 nt Target #2: | 5′-AGAAGCUUGCUGGUAGCAC-3′ | (SEQ ID NO: 3114) |
| EGFR-4288 19 nt Target #3: | 5′-AAGAAGCUUGCUGGUAGCA-3′ | (SEQ ID NO: 3374) |
| EGFR-4290 19 nt Target #1: | 5′-AGCUUGCUGGUAGCACUUG-3′ | (SEQ ID NO: 2855) |
| EGFR-4290 19 nt Target #2: | 5′-AAGCUUGCUGGUAGCACUU-3′ | (SEQ ID NO: 3115) |
| EGFR-4290 19 nt Target #3: | 5′-GAAGCUUGCUGGUAGCACU-3′ | (SEQ ID NO: 3375) |
| EGFR-4291 19 nt Target #1: | 5′-GCUUGCUGGUAGCACUUGC-3′ | (SEQ ID NO: 2856) |
| EGFR-4291 19 nt Target #2: | 5′-AGCUUGCUGGUAGCACUUG-3′ | (SEQ ID NO: 3116) |
| EGFR-4291 19 nt Target #3: | 5′-AAGCUUGCUGGUAGCACUU-3′ | (SEQ ID NO: 3376) |
| EGFR-4292 19 nt Target #1: | 5′-CUUGCUGGUAGCACUUGCU-3′ | (SEQ ID NO: 2857) |
| EGFR-4292 19 nt Target #2: | 5′-GCUUGCUGGUAGCACUUGC-3′ | (SEQ ID NO: 3117) |
| EGFR-4292 19 nt Target #3: | 5′-AGCUUGCUGGUAGCACUUG-3′ | (SEQ ID NO: 3377) |
| EGFR-4293 19 nt Target #1: | 5′-UUGCUGGUAGCACUUGCUA-3′ | (SEQ ID NO: 2858) |
| EGFR-4293 19 nt Target #2: | 5′-CUUGCUGGUAGCACUUGCU-3′ | (SEQ ID NO: 3118) |
| EGFR-4293 19 nt Target #3: | 5′-GCUUGCUGGUAGCACUUGC-3′ | (SEQ ID NO: 3378) |
| EGFR-4294 19 nt Target #1: | 5′-UGCUGGUAGCACUUGCUAC-3′ | (SEQ ID NO: 2859) |
| EGFR-4294 19 nt Target #2: | 5′-UUGCUGGUAGCACUUGCUA-3′ | (SEQ ID NO: 3119) |
| EGFR-4294 19 nt Target #3: | 5′-CUUGCUGGUAGCACUUGCU-3′ | (SEQ ID NO: 3379) |
| EGFR-4295 19 nt Target #1: | 5′-GCUGGUAGCACUUGCUACC-3′ | (SEQ ID NO: 2860) |
| EGFR-4295 19 nt Target #2: | 5′-UGCUGGUAGCACUUGCUAC-3′ | (SEQ ID NO: 3120) |
| EGFR-4295 19 nt Target #3: | 5′-UUGCUGGUAGCACUUGCUA-3′ | (SEQ ID NO: 3380) |
| EGFR-4372 19 nt Target #1: | 5′-AUGCUUGAUUCCAGUGGUU-3′ | (SEQ ID NO: 2861) |
| EGFR-4372 19 nt Target #2: | 5′-GAUGCUUGAUUCCAGUGGU-3′ | (SEQ ID NO: 3121) |
| EGFR-4372 19 nt Target #3: | 5′-GGAUGCUUGAUUCCAGUGG-3′ | (SEQ ID NO: 3381) |
| EGFR-4373 19 nt Target #1: | 5′-UGCUUGAUUCCAGUGGUUC-3′ | (SEQ ID NO: 2862) |
| EGFR-4373 19 nt Target #2: | 5′-AUGCUUGAUUCCAGUGGUU-3′ | (SEQ ID NO: 3122) |
| EGFR-4373 19 nt Target #3: | 5′-GAUGCUUGAUUCCAGUGGU-3′ | (SEQ ID NO: 3382) |
| EGFR-4450 19 nt Target #1: | 5′-CAGGCCGGAUCGGUACUGU-3′ | (SEQ ID NO: 2863) |
| EGFR-4450 19 nt Target #2: | 5′-GCAGGCCGGAUCGGUACUG-3′ | (SEQ ID NO: 3123) |
| EGFR-4450 19 nt Target #3: | 5′-AGCAGGCCGGAUCGGUACU-3′ | (SEQ ID NO: 3383) |
| EGFR-4455 19 nt Target #1: | 5′-CGGAUCGGUACUGUAUCAA-3′ | (SEQ ID NO: 2864) |
| EGFR-4455 19 nt Target #2: | 5′-CCGGAUCGGUACUGUAUCA-3′ | (SEQ ID NO: 3124) |
| EGFR-4455 19 nt Target #3: | 5′-GCCGGAUCGGUACUGUAUC-3′ | (SEQ ID NO: 3384) |
| EGFR-4550 19 nt Target #1: | 5′-CUUAGACUUACUUUUGUAA-3′ | (SEQ ID NO: 2865) |
| EGFR-4550 19 nt Target #2: | 5′-CCUUAGACUUACUUUUGUA-3′ | (SEQ ID NO: 3125) |
| EGFR-4550 19 nt Target #3: | 5′-UCCUUAGACUUACUUUUGU-3′ | (SEQ ID NO: 3385) |
| EGFR-4684 19 nt Target #1: | 5′-GUCUUGCUGUCAUGAAAUC-3′ | (SEQ ID NO: 2866) |
| EGFR-4684 19 nt Target #2: | 5′-UGUCUUGCUGUCAUGAAAU-3′ | (SEQ ID NO: 3126) |
| EGFR-4684 19 nt Target #3: | 5′-CUGUCUUGCUGUCAUGAAA-3′ | (SEQ ID NO: 3386) |
| EGFR-4804 19 nt Target #1: | 5′-UAAGGAUAGCACCGCUUUU-3′ | (SEQ ID NO: 2867) |
| EGFR-4804 19 nt Target #2: | 5′-CUAAGGAUAGCACCGCUUU-3′ | (SEQ ID NO: 3127) |
| EGFR-4804 19 nt Target #3: | 5′-CCUAAGGAUAGCACCGCUU-3′ | (SEQ ID NO: 3387) |
| EGFR-4806 19 nt Target #1: | 5′-AGGAUAGCACCGCUUUUGU-3′ | (SEQ ID NO: 2868) |
| EGFR-4806 19 nt Target #2: | 5′-AAGGAUAGCACCGCUUUUG-3′ | (SEQ ID NO: 3128) |
| EGFR-4806 19 nt Target #3: | 5′-UAAGGAUAGCACCGCUUUU-3′ | (SEQ ID NO: 3388) |
| EGFR-4807 19 nt Target #1: | 5′-GGAUAGCACCGCUUUUGUU-3′ | (SEQ ID NO: 2869) |
| EGFR-4807 19 nt Target #2: | 5′-AGGAUAGCACCGCUUUUGU-3′ | (SEQ ID NO: 3129) |
| EGFR-4807 19 nt Target #3: | 5′-AAGGAUAGCACCGCUUUUG-3′ | (SEQ ID NO: 3389) |
| EGFR-4808 19 nt Target #1: | 5′-GAUAGCACCGCUUUUGUUC-3′ | (SEQ ID NO: 2870) |
| EGFR-4808 19 nt Target #2: | 5′-GGAUAGCACCGCUUUUGUU-3′ | (SEQ ID NO: 3130) |
| EGFR-4808 19 nt Target #3: | 5′-AGGAUAGCACCGCUUUUGU-3′ | (SEQ ID NO: 3390) |
| EGFR-4809 19 nt Target #1: | 5′-AUAGCACCGCUUUUGUUCU-3′ | (SEQ ID NO: 2871) |
| EGFR-4809 19 nt Target #2: | 5′-GAUAGCACCGCUUUUGUUC-3′ | (SEQ ID NO: 3131) |
| EGFR-4809 19 nt Target #3: | 5′-GGAUAGCACCGCUUUUGUU-3′ | (SEQ ID NO: 3391) |
| EGFR-4810 19 nt Target #1: | 5′-UAGCACCGCUUUUGUUCUC-3′ | (SEQ ID NO: 2872) |
| EGFR-4810 19 nt Target #2: | 5′-AUAGCACCGCUUUUGUUCU-3′ | (SEQ ID NO: 3132) |
| EGFR-4810 19 nt Target #3: | 5′-GAUAGCACCGCUUUUGUUC-3′ | (SEQ ID NO: 3392) |
| EGFR-4811 19 nt Target #1: | 5′-AGCACCGCUUUUGUUCUCG-3′ | (SEQ ID NO: 2873) |
| EGFR-4811 19 nt Target #2: | 5′-UAGCACCGCUUUUGUUCUC-3′ | (SEQ ID NO: 3133) |
| EGFR-4811 19 nt Target #3: | 5′-AUAGCACCGCUUUUGUUCU-3′ | (SEQ ID NO: 3393) |
| EGFR-4812 19 nt Target #1: | 5′-GCACCGCUUUUGUUCUCGC-3′ | (SEQ ID NO: 2874) |
| EGFR-4812 19 nt Target #2: | 5′-AGCACCGCUUUUGUUCUCG-3′ | (SEQ ID NO: 3134) |
| EGFR-4812 19 nt Target #3: | 5′-UAGCACCGCUUUUGUUCUC-3′ | (SEQ ID NO: 3394) |
| EGFR-4813 19 nt Target #1: | 5′-CACCGCUUUUGUUCUCGCA-3′ | (SEQ ID NO: 2875) |
| EGFR-4813 19 nt Target #2: | 5′-GCACCGCUUUUGUUCUCGC-3′ | (SEQ ID NO: 3135) |
| EGFR-4813 19 nt Target #3: | 5′-AGCACCGCUUUUGUUCUCG-3′ | (SEQ ID NO: 3395) |
| EGFR-4816 19 nt Target #1: | 5′-CGCUUUUGUUCUCGCAAAA-3′ | (SEQ ID NO: 2876) |
| EGFR-4816 19 nt Target #2: | 5′-CCGCUUUUGUUCUCGCAAA-3′ | (SEQ ID NO: 3136) |
| EGFR-4816 19 nt Target #3: | 5′-ACCGCUUUUGUUCUCGCAA-3′ | (SEQ ID NO: 3396) |
| EGFR-4817 19 nt Target #1: | 5′-GCUUUUGUUCUCGCAAAAA-3′ | (SEQ ID NO: 2877) |
| EGFR-4817 19 nt Target #2: | 5′-CGCUUUUGUUCUCGCAAAA-3′ | (SEQ ID NO: 3137) |
| EGFR-4817 19 nt Target #3: | 5′-CCGCUUUUGUUCUCGCAAA-3′ | (SEQ ID NO: 3397) |
| EGFR-4818 19 nt Target #1: | 5′-CUUUUGUUCUCGCAAAAAC-3′ | (SEQ ID NO: 2878) |
| EGFR-4818 19 nt Target #2: | 5′-GCUUUUGUUCUCGCAAAAA-3′ | (SEQ ID NO: 3138) |
| EGFR-4818 19 nt Target #3: | 5′-CGCUUUUGUUCUCGCAAAA-3′ | (SEQ ID NO: 3398) |
| EGFR-4819 19 nt Target #1: | 5′-UUUUGUUCUCGCAAAAACG-3′ | (SEQ ID NO: 2879) |
| EGFR-4819 19 nt Target #2: | 5′-CUUUUGUUCUCGCAAAAAC-3′ | (SEQ ID NO: 3139) |
| EGFR-4819 19 nt Target #3: | 5′-GCUUUUGUUCUCGCAAAAA-3′ | (SEQ ID NO: 3399) |
| EGFR-4824 19 nt Target #1: | 5′-UUCUCGCAAAAACGUAUCU-3′ | (SEQ ID NO: 2880) |
| EGFR-4824 19 nt Target #2: | 5′-GUUCUCGCAAAAACGUAUC-3′ | (SEQ ID NO: 3140) |
| EGFR-4824 19 nt Target #3: | 5′-UGUUCUCGCAAAAACGUAU-3′ | (SEQ ID NO: 3400) |
| EGFR-4953 19 nt Target #1: | 5′-AAAUUAGUUUGUGUUACUU-3′ | (SEQ ID NO: 2881) |
| EGFR-4953 19 nt Target #2: | 5′-AAAAUUAGUUUGUGUUACU-3′ | (SEQ ID NO: 3141) |
| EGFR-4953 19 nt Target #3: | 5′-CAAAAUUAGUUUGUGUUAC-3′ | (SEQ ID NO: 3401) |
| EGFR-4970 19 nt Target #1: | 5′-UUAUGGAAGAUAGUUUUCU-3′ | (SEQ ID NO: 2882) |
| EGFR-4970 19 nt Target #2: | 5′-CUUAUGGAAGAUAGUUUUC-3′ | (SEQ ID NO: 3142) |
| EGFR-4970 19 nt Target #3: | 5′-ACUUAUGGAAGAUAGUUUU-3′ | (SEQ ID NO: 3402) |
| EGFR-5003 19 nt Target #1: | 5′-UCAAAAGCUUUUUACUCAA-3′ | (SEQ ID NO: 2883) |
| EGFR-5003 19 nt Target #2: | 5′-UUCAAAAGCUUUUUACUCA-3′ | (SEQ ID NO: 3143) |
| EGFR-5003 19 nt Target #3: | 5′-CUUCAAAAGCUUUUUACUC-3′ | (SEQ ID NO: 3403) |
| EGFR-5206 19 nt Target #1: | 5′-ACUAGGGUUUGAAAUUGAU-3′ | (SEQ ID NO: 2884) |
| EGFR-5206 19 nt Target #2: | 5′-AACUAGGGUUUGAAAUUGA-3′ | (SEQ ID NO: 3144) |
| EGFR-5206 19 nt Target #3: | 5′-AAACUAGGGUUUGAAAUUG-3′ | (SEQ ID NO: 3404) |
| EGFR-5275 19 nt Target #1: | 5′-UAAAAUAAUUUCUCUACAA-3′ | (SEQ ID NO: 2885) |
| EGFR-5275 19 nt Target #2: | 5′-CUAAAAUAAUUUCUCUACA-3′ | (SEQ ID NO: 3145) |
| EGFR-5275 19 nt Target #3: | 5′-CCUAAAAUAAUUUCUCUAC-3′ | (SEQ ID NO: 3405) |
| EGFR-5374 19 nt Target #1: | 5′-CAGCAGUCCUUUGUAAACA-3′ | (SEQ ID NO: 2886) |
| EGFR-5374 19 nt Target #2: | 5′-ACAGCAGUCCUUUGUAAAC-3′ | (SEQ ID NO: 3146) |
| EGFR-5374 19 nt Target #3: | 5′-AACAGCAGUCCUUUGUAAA-3′ | (SEQ ID NO: 3406) |
| EGFR-5429 19 nt Target #1: | 5′-CAAUUUAUCAAGGAAGAAA-3′ | (SEQ ID NO: 2887) |
| EGFR-5429 19 nt Target #2: | 5′-CCAAUUUAUCAAGGAAGAA-3′ | (SEQ ID NO: 3147) |
| EGFR-5429 19 nt Target #3: | 5′-UCCAAUUUAUCAAGGAAGA-3′ | (SEQ ID NO: 3407) |
| EGFR-5497 19 nt Target #1: | 5′-UACAAAAUGUUCCUUUUGC-3′ | (SEQ ID NO: 2888) |
| EGFR-5497 19 nt Target #2: | 5′-AUACAAAAUGUUCCUUUUG-3′ | (SEQ ID NO: 3148) |
| EGFR-5497 19 nt Target #3: | 5′-CAUACAAAAUGUUCCUUUU-3′ | (SEQ ID NO: 3408) |
| EGFR-5505 19 nt Target #1: | 5′-GUUCCUUUUGCUUUUAAAG-3′ | (SEQ ID NO: 2889) |
| EGFR-5505 19 nt Target #2: | 5′-UGUUCCUUUUGCUUUUAAA-3′ | (SEQ ID NO: 3149) |
| EGFR-5505 19 nt Target #3: | 5′-AUGUUCCUUUUGCUUUUAA-3′ | (SEQ ID NO: 3409) |
| EGFR-5506 19 nt Target #1: | 5′-UUCCUUUUGCUUUUAAAGU-3′ | (SEQ ID NO: 2890) |
| EGFR-5506 19 nt Target #2: | 5′-GUUCCUUUUGCUUUUAAAG-3′ | (SEQ ID NO: 3150) |
| EGFR-5506 19 nt Target #3: | 5′-UGUUCCUUUUGCUUUUAAA-3′ | (SEQ ID NO: 3410) |
| EGFR-5512 19 nt Target #1: | 5′-UUGCUUUUAAAGUAAUUUU-3′ | (SEQ ID NO: 2891) |
| EGFR-5512 19 nt Target #2: | 5′-UUUGCUUUUAAAGUAAUUU-3′ | (SEQ ID NO: 3151) |
| EGFR-5512 19 nt Target #3: | 5′-UUUUGCUUUUAAAGUAAUU-3′ | (SEQ ID NO: 3411) |
| EGFR-5565 19 nt Target #1: | 5′-GUUAAGAAAGUAUUUGAUU-3′ | (SEQ ID NO: 2892) |
| EGFR-5565 19 nt Target #2: | 5′-UGUUAAGAAAGUAUUUGAU-3′ | (SEQ ID NO: 3152) |
| EGFR-5565 19 nt Target #3: | 5′-UUGUUAAGAAAGUAUUUGA-3′ | (SEQ ID NO: 3412) |
| EGFR-463 19 nt Target #1: | 5′-UUGGAAAUUACCUAUGUGC-3′ | (SEQ ID NO: 2893) |
| EGFR-463 19 nt Target #2: | 5′-UUUGGAAAUUACCUAUGUG-3′ | (SEQ ID NO: 3153) |
| EGFR-463 19 nt Target #3: | 5′-AUUUGGAAAUUACCUAUGU-3′ | (SEQ ID NO: 3413) |
| EGFR-464 19 nt Target #1: | 5′-UGGAAAUUACCUAUGUGCA-3′ | (SEQ ID NO: 2894) |
| EGFR-464 19 nt Target #2: | 5′-UUGGAAAUUACCUAUGUGC-3′ | (SEQ ID NO: 3154) |
| EGFR-464 19 nt Target #3: | 5′-UUUGGAAAUUACCUAUGUG-3′ | (SEQ ID NO: 3414) |
| EGFR-496 19 nt Target #1: | 5′-CUUUCCUUCUUAAAGACCA-3′ | (SEQ ID NO: 2895) |
| EGFR-496 19 nt Target #2: | 5′-UCUUUCCUUCUUAAAGACC-3′ | (SEQ ID NO: 3155) |
| EGFR-496 19 nt Target #3: | 5′-AUCUUUCCUUCUUAAAGAC-3′ | (SEQ ID NO: 3415) |
| EGFR-497 19 nt Target #1: | 5′-UUUCCUUCUUAAAGACCAU-3′ | (SEQ ID NO: 2896) |
| EGFR-497 19 nt Target #2: | 5′-CUUUCCUUCUUAAAGACCA-3′ | (SEQ ID NO: 3156) |
| EGFR-497 19 nt Target #3: | 5′-UCUUUCCUUCUUAAAGACC-3′ | (SEQ ID NO: 3416) |
| EGFR-498 19 nt Target #1: | 5′-UUCCUUCUUAAAGACCAUC-3′ | (SEQ ID NO: 2897) |
| EGFR-498 19 nt Target #2: | 5′-UUUCCUUCUUAAAGACCAU-3′ | (SEQ ID NO: 3157) |
| EGFR-498 19 nt Target #3: | 5′-CUUUCCUUCUUAAAGACCA-3′ | (SEQ ID NO: 3417) |
| EGFR-499 19 nt Target #1: | 5′-UCCUUCUUAAAGACCAUCC-3′ | (SEQ ID NO: 2898) |
| EGFR-499 19 nt Target #2: | 5′-UUCCUUCUUAAAGACCAUC-3′ | (SEQ ID NO: 3158) |
| EGFR-499 19 nt Target #3: | 5′-UUUCCUUCUUAAAGACCAU-3′ | (SEQ ID NO: 3418) |
| EGFR-500 19 nt Target #1: | 5′-CCUUCUUAAAGACCAUCCA-3′ | (SEQ ID NO: 2899) |
| EGFR-500 19 nt Target #2: | 5′-UCCUUCUUAAAGACCAUCC-3′ | (SEQ ID NO: 3159) |
| EGFR-500 19 nt Target #3: | 5′-UUCCUUCUUAAAGACCAUC-3′ | (SEQ ID NO: 3419) |
| EGFR-501 19 nt Target #1: | 5′-CUUCUUAAAGACCAUCCAG-3′ | (SEQ ID NO: 2900) |
| EGFR-501 19 nt Target #2: | 5′-CCUUCUUAAAGACCAUCCA-3′ | (SEQ ID NO: 3160) |
| EGFR-501 19 nt Target #3: | 5′-UCCUUCUUAAAGACCAUCC-3′ | (SEQ ID NO: 3420) |
| EGFR-502 19 nt Target #1: | 5′-UUCUUAAAGACCAUCCAGG-3′ | (SEQ ID NO: 2901) |
| EGFR-502 19 nt Target #2: | 5′-CUUCUUAAAGACCAUCCAG-3′ | (SEQ ID NO: 3161) |
| EGFR-502 19 nt Target #3: | 5′-CCUUCUUAAAGACCAUCCA-3′ | (SEQ ID NO: 3421) |
| EGFR-503 19 nt Target #1: | 5′-UCUUAAAGACCAUCCAGGA-3′ | (SEQ ID NO: 2902) |
| EGFR-503 19 nt Target #2: | 5′-UUCUUAAAGACCAUCCAGG-3′ | (SEQ ID NO: 3162) |
| EGFR-503 19 nt Target #3: | 5′-CUUCUUAAAGACCAUCCAG-3′ | (SEQ ID NO: 3422) |
| EGFR-504 19 nt Target #1: | 5′-CUUAAAGACCAUCCAGGAG-3′ | (SEQ ID NO: 2903) |
| EGFR-504 19 nt Target #2: | 5′-UCUUAAAGACCAUCCAGGA-3′ | (SEQ ID NO: 3163) |
| EGFR-504 19 nt Target #3: | 5′-UUCUUAAAGACCAUCCAGG-3′ | (SEQ ID NO: 3423) |
| EGFR-505 19 nt Target #1: | 5′-UUAAAGACCAUCCAGGAGG-3′ | (SEQ ID NO: 2904) |
| EGFR-505 19 nt Target #2: | 5′-CUUAAAGACCAUCCAGGAG-3′ | (SEQ ID NO: 3164) |
| EGFR-505 19 nt Target #3: | 5′-UCUUAAAGACCAUCCAGGA-3′ | (SEQ ID NO: 3424) |
| EGFR-506 19 nt Target #1: | 5′-UAAAGACCAUCCAGGAGGU-3′ | (SEQ ID NO: 2905) |
| EGFR-506 19 nt Target #2: | 5′-UUAAAGACCAUCCAGGAGG-3′ | (SEQ ID NO: 3165) |
| EGFR-506 19 nt Target #3: | 5′-CUUAAAGACCAUCCAGGAG-3′ | (SEQ ID NO: 3425) |
| EGFR-507 19 nt Target #1: | 5′-AAAGACCAUCCAGGAGGUG-3′ | (SEQ ID NO: 2906) |
| EGFR-507 19 nt Target #2: | 5′-UAAAGACCAUCCAGGAGGU-3′ | (SEQ ID NO: 3166) |
| EGFR-507 19 nt Target #3: | 5′-UUAAAGACCAUCCAGGAGG-3′ | (SEQ ID NO: 3426) |
| EGFR-508 19 nt Target #1: | 5′-AAGACCAUCCAGGAGGUGG-3′ | (SEQ ID NO: 2907) |
| EGFR-508 19 nt Target #2: | 5′-AAAGACCAUCCAGGAGGUG-3′ | (SEQ ID NO: 3167) |
| EGFR-508 19 nt Target #3: | 5′-UAAAGACCAUCCAGGAGGU-3′ | (SEQ ID NO: 3427) |
| EGFR-509 19 nt Target #1: | 5′-AGACCAUCCAGGAGGUGGC-3′ | (SEQ ID NO: 2908) |
| EGFR-509 19 nt Target #2: | 5′-AAGACCAUCCAGGAGGUGG-3′ | (SEQ ID NO: 3168) |
| EGFR-509 19 nt Target #3: | 5′-AAAGACCAUCCAGGAGGUG-3′ | (SEQ ID NO: 3428) |
| EGFR-838 19 nt Target #1: | 5′-UGUGAUCCAAGCUGUCCCA-3′ | (SEQ ID NO: 2909) |
| EGFR-838 19 nt Target #2: | 5′-GUGUGAUCCAAGCUGUCCC-3′ | (SEQ ID NO: 3169) |
| EGFR-838 19 nt Target #3: | 5′-AGUGUGAUCCAAGCUGUCC-3′ | (SEQ ID NO: 3429) |
| EGFR-839 19 nt Target #1: | 5′-GUGAUCCAAGCUGUCCCAA-3′ | (SEQ ID NO: 2910) |
| EGFR-839 19 nt Target #2: | 5′-UGUGAUCCAAGCUGUCCCA-3′ | (SEQ ID NO: 3170) |
| EGFR-839 19 nt Target #3: | 5′-GUGUGAUCCAAGCUGUCCC-3′ | (SEQ ID NO: 3430) |
| EGFR-840 19 nt Target #1: | 5′-UGAUCCAAGCUGUCCCAAU-3′ | (SEQ ID NO: 2911) |
| EGFR-840 19 nt Target #2: | 5′-GUGAUCCAAGCUGUCCCAA-3′ | (SEQ ID NO: 3171) |
| EGFR-840 19 nt Target #3: | 5′-UGUGAUCCAAGCUGUCCCA-3′ | (SEQ ID NO: 3431) |
| EGFR-841 19 nt Target #1: | 5′-GAUCCAAGCUGUCCCAAUG-3′ | (SEQ ID NO: 2912) |
| EGFR-841 19 nt Target #2: | 5′-UGAUCCAAGCUGUCCCAAU-3′ | (SEQ ID NO: 3172) |
| EGFR-841 19 nt Target #3: | 5′-GUGAUCCAAGCUGUCCCAA-3′ | (SEQ ID NO: 3432) |
| EGFR-842 19 nt Target #1: | 5′-AUCCAAGCUGUCCCAAUGG-3′ | (SEQ ID NO: 2913) |
| EGFR-842 19 nt Target #2: | 5′-GAUCCAAGCUGUCCCAAUG-3′ | (SEQ ID NO: 3173) |
| EGFR-842 19 nt Target #3: | 5′-UGAUCCAAGCUGUCCCAAU-3′ | (SEQ ID NO: 3433) |
| EGFR-876 19 nt Target #1: | 5′-AGGAGAGGAGAACUGCCAG-3′ | (SEQ ID NO: 2914) |
| EGFR-876 19 nt Target #2: | 5′-CAGGAGAGGAGAACUGCCA-3′ | (SEQ ID NO: 3174) |
| EGFR-876 19 nt Target #3: | 5′-GCAGGAGAGGAGAACUGCC-3′ | (SEQ ID NO: 3434) |
| EGFR-877 19 nt Target #1: | 5′-GGAGAGGAGAACUGCCAGA-3′ | (SEQ ID NO: 2915) |
| EGFR-877 19 nt Target #2: | 5′-AGGAGAGGAGAACUGCCAG-3′ | (SEQ ID NO: 3175) |
| EGFR-877 19 nt Target #3: | 5′-CAGGAGAGGAGAACUGCCA-3′ | (SEQ ID NO: 3435) |
| EGFR-878 19 nt Target #1: | 5′-GAGAGGAGAACUGCCAGAA-3′ | (SEQ ID NO: 2916) |
| EGFR-878 19 nt Target #2: | 5′-GGAGAGGAGAACUGCCAGA-3′ | (SEQ ID NO: 3176) |
| EGFR-878 19 nt Target #3: | 5′-AGGAGAGGAGAACUGCCAG-3′ | (SEQ ID NO: 3436) |
| EGFR-879 19 nt Target #1: | 5′-AGAGGAGAACUGCCAGAAA-3′ | (SEQ ID NO: 2917) |
| EGFR-879 19 nt Target #2: | 5′-GAGAGGAGAACUGCCAGAA-3′ | (SEQ ID NO: 3177) |
| EGFR-879 19 nt Target #3: | 5′-GGAGAGGAGAACUGCCAGA-3′ | (SEQ ID NO: 3437) |
| EGFR-899 19 nt Target #1: | 5′-UGACCAAAAUCAUCUGUGC-3′ | (SEQ ID NO: 2918) |
| EGFR-899 19 nt Target #2: | 5′-CUGACCAAAAUCAUCUGUG-3′ | (SEQ ID NO: 3178) |
| EGFR-899 19 nt Target #3: | 5′-ACUGACCAAAAUCAUCUGU-3′ | (SEQ ID NO: 3438) |
| EGFR-900 19 nt Target #1: | 5′-GACCAAAAUCAUCUGUGCC-3′ | (SEQ ID NO: 2919) |
| EGFR-900 19 nt Target #2: | 5′-UGACCAAAAUCAUCUGUGC-3′ | (SEQ ID NO: 3179) |
| EGFR-900 19 nt Target #3: | 5′-CUGACCAAAAUCAUCUGUG-3′ | (SEQ ID NO: 3439) |
| EGFR-901 19 nt Target #1: | 5′-ACCAAAAUCAUCUGUGCCC-3′ | (SEQ ID NO: 2920) |
| EGFR-901 19 nt Target #2: | 5′-GACCAAAAUCAUCUGUGCC-3′ | (SEQ ID NO: 3180) |
| EGFR-901 19 nt Target #3: | 5′-UGACCAAAAUCAUCUGUGC-3′ | (SEQ ID NO: 3440) |
| EGFR-902 19 nt Target #1: | 5′-CCAAAAUCAUCUGUGCCCA-3′ | (SEQ ID NO: 2921) |
| EGFR-902 19 nt Target #2: | 5′-ACCAAAAUCAUCUGUGCCC-3′ | (SEQ ID NO: 3181) |
| EGFR-902 19 nt Target #3: | 5′-GACCAAAAUCAUCUGUGCC-3′ | (SEQ ID NO: 3441) |
| EGFR-903 19 nt Target #1: | 5′-CAAAAUCAUCUGUGCCCAG-3′ | (SEQ ID NO: 2922) |
| EGFR-903 19 nt Target #2: | 5′-CCAAAAUCAUCUGUGCCCA-3′ | (SEQ ID NO: 3182) |
| EGFR-903 19 nt Target #3: | 5′-ACCAAAAUCAUCUGUGCCC-3′ | (SEQ ID NO: 3442) |
| EGFR-904 19 nt Target #1: | 5′-AAAAUCAUCUGUGCCCAGC-3′ | (SEQ ID NO: 2923) |
| EGFR-904 19 nt Target #2: | 5′-CAAAAUCAUCUGUGCCCAG-3′ | (SEQ ID NO: 3183) |
| EGFR-904 19 nt Target #3: | 5′-CCAAAAUCAUCUGUGCCCA-3′ | (SEQ ID NO: 3443) |
| EGFR-905 19 nt Target #1: | 5′-AAAUCAUCUGUGCCCAGCA-3′ | (SEQ ID NO: 2924) |
| EGFR-905 19 nt Target #2: | 5′-AAAAUCAUCUGUGCCCAGC-3′ | (SEQ ID NO: 3184) |
| EGFR-905 19 nt Target #3: | 5′-CAAAAUCAUCUGUGCCCAG-3′ | (SEQ ID NO: 3444) |
| EGFR-954 19 nt Target #1: | 5′-CAGUGACUGCUGCCACAAC-3′ | (SEQ ID NO: 2925) |
| EGFR-954 19 nt Target #2: | 5′-CCAGUGACUGCUGCCACAA-3′ | (SEQ ID NO: 3185) |
| EGFR-954 19 nt Target #3: | 5′-CCCAGUGACUGCUGCCACA-3′ | (SEQ ID NO: 3445) |
| EGFR-955 19 nt Target #1: | 5′-AGUGACUGCUGCCACAACC-3′ | (SEQ ID NO: 2926) |
| EGFR-955 19 nt Target #2: | 5′-CAGUGACUGCUGCCACAAC-3′ | (SEQ ID NO: 3186) |
| EGFR-955 19 nt Target #3: | 5′-CCAGUGACUGCUGCCACAA-3′ | (SEQ ID NO: 3446) |
| EGFR-956 19 nt Target #1: | 5′-GUGACUGCUGCCACAACCA-3′ | (SEQ ID NO: 2927) |
| EGFR-956 19 nt Target #2: | 5′-AGUGACUGCUGCCACAACC-3′ | (SEQ ID NO: 3187) |
| EGFR-956 19 nt Target #3: | 5′-CAGUGACUGCUGCCACAAC-3′ | (SEQ ID NO: 3447) |
| EGFR-1313 19 nt Target #1: | 5′-CACUCUCCAUAAAUGCUAC-3′ | (SEQ ID NO: 2928) |
| EGFR-1313 19 nt Target #2: | 5′-UCACUCUCCAUAAAUGCUA-3′ | (SEQ ID NO: 3188) |
| EGFR-1313 19 nt Target #3: | 5′-CUCACUCUCCAUAAAUGCU-3′ | (SEQ ID NO: 3448) |
| EGFR-1480 19 nt Target #1: | 5′-UUUUUGCUGAUUCAGGCUU-3′ | (SEQ ID NO: 2929) |
| EGFR-1480 19 nt Target #2: | 5′-GUUUUUGCUGAUUCAGGCU-3′ | (SEQ ID NO: 3189) |
| EGFR-1480 19 nt Target #3: | 5′-GGUUUUUGCUGAUUCAGGC-3′ | (SEQ ID NO: 3449) |
| EGFR-1481 19 nt Target #1: | 5′-UUUUGCUGAUUCAGGCUUG-3′ | (SEQ ID NO: 2930) |
| EGFR-1481 19 nt Target #2: | 5′-UUUUUGCUGAUUCAGGCUU-3′ | (SEQ ID NO: 3190) |
| EGFR-1481 19 nt Target #3: | 5′-GUUUUUGCUGAUUCAGGCU-3′ | (SEQ ID NO: 3450) |
| EGFR-1482 19 nt Target #1: | 5′-UUUGCUGAUUCAGGCUUGG-3′ | (SEQ ID NO: 2931) |
| EGFR-1482 19 nt Target #2: | 5′-UUUUGCUGAUUCAGGCUUG-3′ | (SEQ ID NO: 3191) |
| EGFR-1482 19 nt Target #3: | 5′-UUUUUGCUGAUUCAGGCUU-3′ | (SEQ ID NO: 3451) |
| EGFR-1483 19 nt Target #1: | 5′-UUGCUGAUUCAGGCUUGGC-3′ | (SEQ ID NO: 2932) |
| EGFR-1483 19 nt Target #2: | 5′-UUUGCUGAUUCAGGCUUGG-3′ | (SEQ ID NO: 3192) |
| EGFR-1483 19 nt Target #3: | 5′-UUUUGCUGAUUCAGGCUUG-3′ | (SEQ ID NO: 3452) |
| EGFR-1484 19 nt Target #1: | 5′-UGCUGAUUCAGGCUUGGCC-3′ | (SEQ ID NO: 2933) |
| EGFR-1484 19 nt Target #2: | 5′-UUGCUGAUUCAGGCUUGGC-3′ | (SEQ ID NO: 3193) |
| EGFR-1484 19 nt Target #3: | 5′-UUUGCUGAUUCAGGCUUGG-3′ | (SEQ ID NO: 3453) |
| EGFR-1485 19 nt Target #1: | 5′-GCUGAUUCAGGCUUGGCCU-3′ | (SEQ ID NO: 2934) |
| EGFR-1485 19 nt Target #2: | 5′-UGCUGAUUCAGGCUUGGCC-3′ | (SEQ ID NO: 3194) |
| EGFR-1485 19 nt Target #3: | 5′-UUGCUGAUUCAGGCUUGGC-3′ | (SEQ ID NO: 3454) |
| EGFR-1486 19 nt Target #1: | 5′-CUGAUUCAGGCUUGGCCUG-3′ | (SEQ ID NO: 2935) |
| EGFR-1486 19 nt Target #2: | 5′-GCUGAUUCAGGCUUGGCCU-3′ | (SEQ ID NO: 3195) |
| EGFR-1486 19 nt Target #3: | 5′-UGCUGAUUCAGGCUUGGCC-3′ | (SEQ ID NO: 3455) |
| EGFR-1487 19 nt Target #1: | 5′-UGAUUCAGGCUUGGCCUGA-3′ | (SEQ ID NO: 2936) |
| EGFR-1487 19 nt Target #2: | 5′-CUGAUUCAGGCUUGGCCUG-3′ | (SEQ ID NO: 3196) |
| EGFR-1487 19 nt Target #3: | 5′-GCUGAUUCAGGCUUGGCCU-3′ | (SEQ ID NO: 3456) |
| EGFR-1561 19 nt Target #1: | 5′-AAGCAACAUGGUCAGUUUU-3′ | (SEQ ID NO: 2937) |
| EGFR-1561 19 nt Target #2: | 5′-CAAGCAACAUGGUCAGUUU-3′ | (SEQ ID NO: 3197) |
| EGFR-1561 19 nt Target #3: | 5′-CCAAGCAACAUGGUCAGUU-3′ | (SEQ ID NO: 3457) |
| EGFR-1562 19 nt Target #1: | 5′-AGCAACAUGGUCAGUUUUC-3′ | (SEQ ID NO: 2938) |
| EGFR-1562 19 nt Target #2: | 5′-AAGCAACAUGGUCAGUUUU-3′ | (SEQ ID NO: 3198) |
| EGFR-1562 19 nt Target #3: | 5′-CAAGCAACAUGGUCAGUUU-3′ | (SEQ ID NO: 3458) |
| EGFR-1563 19 nt Target #1: | 5′-GCAACAUGGUCAGUUUUCU-3′ | (SEQ ID NO: 2939) |
| EGFR-1563 19 nt Target #2: | 5′-AGCAACAUGGUCAGUUUUC-3′ | (SEQ ID NO: 3199) |
| EGFR-1563 19 nt Target #3: | 5′-AAGCAACAUGGUCAGUUUU-3′ | (SEQ ID NO: 3459) |
| EGFR-1691 19 nt Target #1: | 5′-CAAUAAACUGGAAAAAACU-3′ | (SEQ ID NO: 2940) |
| EGFR-1691 19 nt Target #2: | 5′-ACAAUAAACUGGAAAAAAC-3′ | (SEQ ID NO: 3200) |
| EGFR-1691 19 nt Target #3: | 5′-UACAAUAAACUGGAAAAAA-3′ | (SEQ ID NO: 3460) |
| EGFR-1963 19 nt Target #1: | 5′-CAGGCCAUGAACAUCACCU-3′ | (SEQ ID NO: 2941) |
| EGFR-1963 19 nt Target #2: | 5′-UCAGGCCAUGAACAUCACC-3′ | (SEQ ID NO: 3201) |
| EGFR-1963 19 nt Target #3: | 5′-CUCAGGCCAUGAACAUCAC-3′ | (SEQ ID NO: 3461) |
| EGFR-1964 19 nt Target #1: | 5′-AGGCCAUGAACAUCACCUG-3′ | (SEQ ID NO: 2942) |
| EGFR-1964 19 nt Target #2: | 5′-CAGGCCAUGAACAUCACCU-3′ | (SEQ ID NO: 3202) |
| EGFR-1964 19 nt Target #3: | 5′-UCAGGCCAUGAACAUCACC-3′ | (SEQ ID NO: 3462) |
| EGFR-2008 19 nt Target #1: | 5′-AUCCAGUGUGCCCACUACA-3′ | (SEQ ID NO: 2943) |
| EGFR-2008 19 nt Target #2: | 5′-UAUCCAGUGUGCCCACUAC-3′ | (SEQ ID NO: 3203) |
| EGFR-2008 19 nt Target #3: | 5′-GUAUCCAGUGUGCCCACUA-3′ | (SEQ ID NO: 3463) |
| EGFR-2009 19 nt Target #1: | 5′-UCCAGUGUGCCCACUACAU-3′ | (SEQ ID NO: 2944) |
| EGFR-2009 19 nt Target #2: | 5′-AUCCAGUGUGCCCACUACA-3′ | (SEQ ID NO: 3204) |
| EGFR-2009 19 nt Target #3: | 5′-UAUCCAGUGUGCCCACUAC-3′ | (SEQ ID NO: 3464) |
| EGFR-2010 19 nt Target #1: | 5′-CCAGUGUGCCCACUACAUU-3′ | (SEQ ID NO: 2945) |
| EGFR-2010 19 nt Target #2: | 5′-UCCAGUGUGCCCACUACAU-3′ | (SEQ ID NO: 3205) |
| EGFR-2010 19 nt Target #3: | 5′-AUCCAGUGUGCCCACUACA-3′ | (SEQ ID NO: 3465) |
| EGFR-2011 19 nt Target #1: | 5′-CAGUGUGCCCACUACAUUG-3′ | (SEQ ID NO: 2946) |
| EGFR-2011 19 nt Target #2: | 5′-CCAGUGUGCCCACUACAUU-3′ | (SEQ ID NO: 3206) |
| EGFR-2011 19 nt Target #3: | 5′-UCCAGUGUGCCCACUACAU-3′ | (SEQ ID NO: 3466) |
| EGFR-2012 19 nt Target #1: | 5′-AGUGUGCCCACUACAUUGA-3′ | (SEQ ID NO: 2947) |
| EGFR-2012 19 nt Target #2: | 5′-CAGUGUGCCCACUACAUUG-3′ | (SEQ ID NO: 3207) |
| EGFR-2012 19 nt Target #3: | 5′-CCAGUGUGCCCACUACAUU-3′ | (SEQ ID NO: 3467) |
| EGFR-2401 19 nt Target #1: | 5′-GAAUUCAAAAAGAUCAAAG-3′ | (SEQ ID NO: 2948) |
| EGFR-2401 19 nt Target #2: | 5′-UGAAUUCAAAAAGAUCAAA-3′ | (SEQ ID NO: 3208) |
| EGFR-2401 19 nt Target #3: | 5′-CUGAAUUCAAAAAGAUCAA-3′ | (SEQ ID NO: 3468) |
| EGFR-2402 19 nt Target #1: | 5′-AAUUCAAAAAGAUCAAAGU-3′ | (SEQ ID NO: 2949) |
| EGFR-2402 19 nt Target #2: | 5′-GAAUUCAAAAAGAUCAAAG-3′ | (SEQ ID NO: 3209) |
| EGFR-2402 19 nt Target #3: | 5′-UGAAUUCAAAAAGAUCAAA-3′ | (SEQ ID NO: 3469) |
| EGFR-2458 19 nt Target #1: | 5′-CUCUGGAUCCCAGAAGGUG-3′ | (SEQ ID NO: 2950) |
| EGFR-2458 19 nt Target #2: | 5′-ACUCUGGAUCCCAGAAGGU-3′ | (SEQ ID NO: 3210) |
| EGFR-2458 19 nt Target #3: | 5′-GACUCUGGAUCCCAGAAGG-3′ | (SEQ ID NO: 3470) |
| EGFR-2459 19 nt Target #1: | 5′-UCUGGAUCCCAGAAGGUGA-3′ | (SEQ ID NO: 2951) |
| EGFR-2459 19 nt Target #2: | 5′-CUCUGGAUCCCAGAAGGUG-3′ | (SEQ ID NO: 3211) |
| EGFR-2459 19 nt Target #3: | 5′-ACUCUGGAUCCCAGAAGGU-3′ | (SEQ ID NO: 3471) |
| EGFR-2460 19 nt Target #1: | 5′-CUGGAUCCCAGAAGGUGAG-3′ | (SEQ ID NO: 2952) |
| EGFR-2460 19 nt Target #2: | 5′-UCUGGAUCCCAGAAGGUGA-3′ | (SEQ ID NO: 3212) |
| EGFR-2460 19 nt Target #3: | 5′-CUCUGGAUCCCAGAAGGUG-3′ | (SEQ ID NO: 3472) |
| EGFR-2461 19 nt Target #1: | 5′-UGGAUCCCAGAAGGUGAGA-3′ | (SEQ ID NO: 2953) |
| EGFR-2461 19 nt Target #2: | 5′-CUGGAUCCCAGAAGGUGAG-3′ | (SEQ ID NO: 3213) |
| EGFR-2461 19 nt Target #3: | 5′-UCUGGAUCCCAGAAGGUGA-3′ | (SEQ ID NO: 3473) |
| EGFR-2462 19 nt Target #1: | 5′-GGAUCCCAGAAGGUGAGAA-3′ | (SEQ ID NO: 2954) |
| EGFR-2462 19 nt Target #2: | 5′-UGGAUCCCAGAAGGUGAGA-3′ | (SEQ ID NO: 3214) |
| EGFR-2462 19 nt Target #3: | 5′-CUGGAUCCCAGAAGGUGAG-3′ | (SEQ ID NO: 3474) |
| EGFR-2463 19 nt Target #1: | 5′-GAUCCCAGAAGGUGAGAAA-3′ | (SEQ ID NO: 2955) |
| EGFR-2463 19 nt Target #2: | 5′-GGAUCCCAGAAGGUGAGAA-3′ | (SEQ ID NO: 3215) |
| EGFR-2463 19 nt Target #3: | 5′-UGGAUCCCAGAAGGUGAGA-3′ | (SEQ ID NO: 3475) |
| EGFR-2464 19 nt Target #1: | 5′-AUCCCAGAAGGUGAGAAAG-3′ | (SEQ ID NO: 2956) |
| EGFR-2464 19 nt Target #2: | 5′-GAUCCCAGAAGGUGAGAAA-3′ | (SEQ ID NO: 3216) |
| EGFR-2464 19 nt Target #3: | 5′-GGAUCCCAGAAGGUGAGAA-3′ | (SEQ ID NO: 3476) |
| EGFR-2465 19 nt Target #1: | 5′-UCCCAGAAGGUGAGAAAGU-3′ | (SEQ ID NO: 2957) |
| EGFR-2465 19 nt Target #2: | 5′-AUCCCAGAAGGUGAGAAAG-3′ | (SEQ ID NO: 3217) |
| EGFR-2465 19 nt Target #3: | 5′-GAUCCCAGAAGGUGAGAAA-3′ | (SEQ ID NO: 3477) |
| EGFR-2815 19 nt Target #1: | 5′-CAGCAUGUCAAGAUCACAG-3′ | (SEQ ID NO: 2958) |
| EGFR-2815 19 nt Target #2: | 5′-GCAGCAUGUCAAGAUCACA-3′ | (SEQ ID NO: 3218) |
| EGFR-2815 19 nt Target #3: | 5′-CGCAGCAUGUCAAGAUCAC-3′ | (SEQ ID NO: 3478) |
| EGFR-2816 19 nt Target #1: | 5′-AGCAUGUCAAGAUCACAGA-3′ | (SEQ ID NO: 2959) |
| EGFR-2816 19 nt Target #2: | 5′-CAGCAUGUCAAGAUCACAG-3′ | (SEQ ID NO: 3219) |
| EGFR-2816 19 nt Target #3: | 5′-GCAGCAUGUCAAGAUCACA-3′ | (SEQ ID NO: 3479) |
| EGFR-2817 19 nt Target #1: | 5′-GCAUGUCAAGAUCACAGAU-3′ | (SEQ ID NO: 2960) |
| EGFR-2817 19 nt Target #2: | 5′-AGCAUGUCAAGAUCACAGA-3′ | (SEQ ID NO: 3220) |
| EGFR-2817 19 nt Target #3: | 5′-CAGCAUGUCAAGAUCACAG-3′ | (SEQ ID NO: 3480) |
| EGFR-2818 19 nt Target #1: | 5′-CAUGUCAAGAUCACAGAUU-3′ | (SEQ ID NO: 2961) |
| EGFR-2818 19 nt Target #2: | 5′-GCAUGUCAAGAUCACAGAU-3′ | (SEQ ID NO: 3221) |
| EGFR-2818 19 nt Target #3: | 5′-AGCAUGUCAAGAUCACAGA-3′ | (SEQ ID NO: 3481) |
| EGFR-2819 19 nt Target #1: | 5′-AUGUCAAGAUCACAGAUUU-3′ | (SEQ ID NO: 2962) |
| EGFR-2819 19 nt Target #2: | 5′-CAUGUCAAGAUCACAGAUU-3′ | (SEQ ID NO: 3222) |
| EGFR-2819 19 nt Target #3: | 5′-GCAUGUCAAGAUCACAGAU-3′ | (SEQ ID NO: 3482) |
| EGFR-2820 19 nt Target #1: | 5′-UGUCAAGAUCACAGAUUUU-3′ | (SEQ ID NO: 2963) |
| EGFR-2820 19 nt Target #2: | 5′-AUGUCAAGAUCACAGAUUU-3′ | (SEQ ID NO: 3223) |
| EGFR-2820 19 nt Target #3: | 5′-CAUGUCAAGAUCACAGAUU-3′ | (SEQ ID NO: 3483) |
| EGFR-2821 19 nt Target #1: | 5′-GUCAAGAUCACAGAUUUUG-3′ | (SEQ ID NO: 2964) |
| EGFR-2821 19 nt Target #2: | 5′-UGUCAAGAUCACAGAUUUU-3′ | (SEQ ID NO: 3224) |
| EGFR-2821 19 nt Target #3: | 5′-AUGUCAAGAUCACAGAUUU-3′ | (SEQ ID NO: 3484) |
| EGFR-2822 19 nt Target #1: | 5′-UCAAGAUCACAGAUUUUGG-3′ | (SEQ ID NO: 2965) |
| EGFR-2822 19 nt Target #2: | 5′-GUCAAGAUCACAGAUUUUG-3′ | (SEQ ID NO: 3225) |
| EGFR-2822 19 nt Target #3: | 5′-UGUCAAGAUCACAGAUUUU-3′ | (SEQ ID NO: 3485) |
| EGFR-2823 19 nt Target #1: | 5′-CAAGAUCACAGAUUUUGGG-3′ | (SEQ ID NO: 2966) |
| EGFR-2823 19 nt Target #2: | 5′-UCAAGAUCACAGAUUUUGG-3′ | (SEQ ID NO: 3226) |
| EGFR-2823 19 nt Target #3: | 5′-GUCAAGAUCACAGAUUUUG-3′ | (SEQ ID NO: 3486) |
| EGFR-2824 19 nt Target #1: | 5′-AAGAUCACAGAUUUUGGGC-3′ | (SEQ ID NO: 2967) |
| EGFR-2824 19 nt Target #2: | 5′-CAAGAUCACAGAUUUUGGG-3′ | (SEQ ID NO: 3227) |
| EGFR-2824 19 nt Target #3: | 5′-UCAAGAUCACAGAUUUUGG-3′ | (SEQ ID NO: 3487) |
| EGFR-2825 19 nt Target #1: | 5′-AGAUCACAGAUUUUGGGCU-3′ | (SEQ ID NO: 2968) |
| EGFR-2825 19 nt Target #2: | 5′-AAGAUCACAGAUUUUGGGC-3′ | (SEQ ID NO: 3228) |
| EGFR-2825 19 nt Target #3: | 5′-CAAGAUCACAGAUUUUGGG-3′ | (SEQ ID NO: 3488) |
| EGFR-2826 19 nt Target #1: | 5′-GAUCACAGAUUUUGGGCUG-3′ | (SEQ ID NO: 2969) |
| EGFR-2826 19 nt Target #2: | 5′-AGAUCACAGAUUUUGGGCU-3′ | (SEQ ID NO: 3229) |
| EGFR-2826 19 nt Target #3: | 5′-AAGAUCACAGAUUUUGGGC-3′ | (SEQ ID NO: 3489) |
| EGFR-2827 19 nt Target #1: | 5′-AUCACAGAUUUUGGGCUGG-3′ | (SEQ ID NO: 2970) |
| EGFR-2827 19 nt Target #2: | 5′-GAUCACAGAUUUUGGGCUG-3′ | (SEQ ID NO: 3230) |
| EGFR-2827 19 nt Target #3: | 5′-AGAUCACAGAUUUUGGGCU-3′ | (SEQ ID NO: 3490) |
| EGFR-2828 19 nt Target #1: | 5′-UCACAGAUUUUGGGCUGGC-3′ | (SEQ ID NO: 2971) |
| EGFR-2828 19 nt Target #2: | 5′-AUCACAGAUUUUGGGCUGG-3′ | (SEQ ID NO: 3231) |
| EGFR-2828 19 nt Target #3: | 5′-GAUCACAGAUUUUGGGCUG-3′ | (SEQ ID NO: 3491) |
| EGFR-2829 19 nt Target #1: | 5′-CACAGAUUUUGGGCUGGCC-3′ | (SEQ ID NO: 2972) |
| EGFR-2829 19 nt Target #2: | 5′-UCACAGAUUUUGGGCUGGC-3′ | (SEQ ID NO: 3232) |
| EGFR-2829 19 nt Target #3: | 5′-AUCACAGAUUUUGGGCUGG-3′ | (SEQ ID NO: 3492) |
| EGFR-2830 19 nt Target #1: | 5′-ACAGAUUUUGGGCUGGCCA-3′ | (SEQ ID NO: 2973) |
| EGFR-2830 19 nt Target #2: | 5′-CACAGAUUUUGGGCUGGCC-3′ | (SEQ ID NO: 3233) |
| EGFR-2830 19 nt Target #3: | 5′-UCACAGAUUUUGGGCUGGC-3′ | (SEQ ID NO: 3493) |
| EGFR-2831 19 nt Target #1: | 5′-CAGAUUUUGGGCUGGCCAA-3′ | (SEQ ID NO: 2974) |
| EGFR-2831 19 nt Target #2: | 5′-ACAGAUUUUGGGCUGGCCA-3′ | (SEQ ID NO: 3234) |
| EGFR-2831 19 nt Target #3: | 5′-CACAGAUUUUGGGCUGGCC-3′ | (SEQ ID NO: 3494) |
| EGFR-2832 19 nt Target #1: | 5′-AGAUUUUGGGCUGGCCAAA-3′ | (SEQ ID NO: 2975) |
| EGFR-2832 19 nt Target #2: | 5′-CAGAUUUUGGGCUGGCCAA-3′ | (SEQ ID NO: 3235) |
| EGFR-2832 19 nt Target #3: | 5′-ACAGAUUUUGGGCUGGCCA-3′ | (SEQ ID NO: 3495) |
| EGFR-2833 19 nt Target #1: | 5′-GAUUUUGGGCUGGCCAAAC-3′ | (SEQ ID NO: 2976) |
| EGFR-2833 19 nt Target #2: | 5′-AGAUUUUGGGCUGGCCAAA-3′ | (SEQ ID NO: 3236) |
| EGFR-2833 19 nt Target #3: | 5′-CAGAUUUUGGGCUGGCCAA-3′ | (SEQ ID NO: 3496) |
| EGFR-2834 19 nt Target #1: | 5′-AUUUUGGGCUGGCCAAACU-3′ | (SEQ ID NO: 2977) |
| EGFR-2834 19 nt Target #2: | 5′-GAUUUUGGGCUGGCCAAAC-3′ | (SEQ ID NO: 3237) |
| EGFR-2834 19 nt Target #3: | 5′-AGAUUUUGGGCUGGCCAAA-3′ | (SEQ ID NO: 3497) |
| EGFR-2835 19 nt Target #1: | 5′-UUUUGGGCUGGCCAAACUG-3′ | (SEQ ID NO: 2978) |
| EGFR-2835 19 nt Target #2: | 5′-AUUUUGGGCUGGCCAAACU-3′ | (SEQ ID NO: 3238) |
| EGFR-2835 19 nt Target #3: | 5′-GAUUUUGGGCUGGCCAAAC-3′ | (SEQ ID NO: 3498) |
| EGFR-2836 19 nt Target #1: | 5′-UUUGGGCUGGCCAAACUGC-3′ | (SEQ ID NO: 2979) |
| EGFR-2836 19 nt Target #2: | 5′-UUUUGGGCUGGCCAAACUG-3′ | (SEQ ID NO: 3239) |
| EGFR-2836 19 nt Target #3: | 5′-AUUUUGGGCUGGCCAAACU-3′ | (SEQ ID NO: 3499) |
| EGFR-2837 19 nt Target #1: | 5′-UUGGGCUGGCCAAACUGCU-3′ | (SEQ ID NO: 2980) |
| EGFR-2837 19 nt Target #2: | 5′-UUUGGGCUGGCCAAACUGC-3′ | (SEQ ID NO: 3240) |
| EGFR-2837 19 nt Target #3: | 5′-UUUUGGGCUGGCCAAACUG-3′ | (SEQ ID NO: 3500) |
| EGFR-2891 19 nt Target #1: | 5′-GCAAAGUGCCUAUCAAGUG-3′ | (SEQ ID NO: 2981) |
| EGFR-2891 19 nt Target #2: | 5′-GGCAAAGUGCCUAUCAAGU-3′ | (SEQ ID NO: 3241) |
| EGFR-2891 19 nt Target #3: | 5′-AGGCAAAGUGCCUAUCAAG-3′ | (SEQ ID NO: 3501) |
| EGFR-2892 19 nt Target #1: | 5′-CAAAGUGCCUAUCAAGUGG-3′ | (SEQ ID NO: 2982) |
| EGFR-2892 19 nt Target #2: | 5′-GCAAAGUGCCUAUCAAGUG-3′ | (SEQ ID NO: 3242) |
| EGFR-2892 19 nt Target #3: | 5′-GGCAAAGUGCCUAUCAAGU-3′ | (SEQ ID NO: 3502) |
| EGFR-2893 19 nt Target #1: | 5′-AAAGUGCCUAUCAAGUGGA-3′ | (SEQ ID NO: 2983) |
| EGFR-2893 19 nt Target #2: | 5′-CAAAGUGCCUAUCAAGUGG-3′ | (SEQ ID NO: 3243) |
| EGFR-2893 19 nt Target #3: | 5′-GCAAAGUGCCUAUCAAGUG-3′ | (SEQ ID NO: 3503) |
| EGFR-2894 19 nt Target #1: | 5′-AAGUGCCUAUCAAGUGGAU-3′ | (SEQ ID NO: 2984) |
| EGFR-2894 19 nt Target #2: | 5′-AAAGUGCCUAUCAAGUGGA-3′ | (SEQ ID NO: 3244) |
| EGFR-2894 19 nt Target #3: | 5′-CAAAGUGCCUAUCAAGUGG-3′ | (SEQ ID NO: 3504) |
| EGFR-2895 19 nt Target #1: | 5′-AGUGCCUAUCAAGUGGAUG-3′ | (SEQ ID NO: 2985) |
| EGFR-2895 19 nt Target #2: | 5′-AAGUGCCUAUCAAGUGGAU-3′ | (SEQ ID NO: 3245) |
| EGFR-2895 19 nt Target #3: | 5′-AAAGUGCCUAUCAAGUGGA-3′ | (SEQ ID NO: 3505) |
| EGFR-2896 19 nt Target #1: | 5′-GUGCCUAUCAAGUGGAUGG-3′ | (SEQ ID NO: 2986) |
| EGFR-2896 19 nt Target #2: | 5′-AGUGCCUAUCAAGUGGAUG-3′ | (SEQ ID NO: 3246) |
| EGFR-2896 19 nt Target #3: | 5′-AAGUGCCUAUCAAGUGGAU-3′ | (SEQ ID NO: 3506) |
| EGFR-2897 19 nt Target #1: | 5′-UGCCUAUCAAGUGGAUGGC-3′ | (SEQ ID NO: 2987) |
| EGFR-2897 19 nt Target #2: | 5′-GUGCCUAUCAAGUGGAUGG-3′ | (SEQ ID NO: 3247) |
| EGFR-2897 19 nt Target #3: | 5′-AGUGCCUAUCAAGUGGAUG-3′ | (SEQ ID NO: 3507) |
| EGFR-3088 19 nt Target #1: | 5′-ACCAUCGAUGUCUACAUGA-3′ | (SEQ ID NO: 2988) |
| EGFR-3088 19 nt Target #2: | 5′-UACCAUCGAUGUCUACAUG-3′ | (SEQ ID NO: 3248) |
| EGFR-3088 19 nt Target #3: | 5′-GUACCAUCGAUGUCUACAU-3′ | (SEQ ID NO: 3508) |
| EGFR-3089 19 nt Target #1: | 5′-CCAUCGAUGUCUACAUGAU-3′ | (SEQ ID NO: 2989) |
| EGFR-3089 19 nt Target #2: | 5′-ACCAUCGAUGUCUACAUGA-3′ | (SEQ ID NO: 3249) |
| EGFR-3089 19 nt Target #3: | 5′-UACCAUCGAUGUCUACAUG-3′ | (SEQ ID NO: 3509) |
| EGFR-3090 19 nt Target #1: | 5′-CAUCGAUGUCUACAUGAUC-3′ | (SEQ ID NO: 2990) |
| EGFR-3090 19 nt Target #2: | 5′-CCAUCGAUGUCUACAUGAU-3′ | (SEQ ID NO: 3250) |
| EGFR-3090 19 nt Target #3: | 5′-ACCAUCGAUGUCUACAUGA-3′ | (SEQ ID NO: 3510) |
| EGFR-3091 19 nt Target #1: | 5′-AUCGAUGUCUACAUGAUCA-3′ | (SEQ ID NO: 2991) |
| EGFR-3091 19 nt Target #2: | 5′-CAUCGAUGUCUACAUGAUC-3′ | (SEQ ID NO: 3251) |
| EGFR-3091 19 nt Target #3: | 5′-CCAUCGAUGUCUACAUGAU-3′ | (SEQ ID NO: 3511) |
| EGFR-3092 19 nt Target #1: | 5′-UCGAUGUCUACAUGAUCAU-3′ | (SEQ ID NO: 2992) |
| EGFR-3092 19 nt Target #2: | 5′-AUCGAUGUCUACAUGAUCA-3′ | (SEQ ID NO: 3252) |
| EGFR-3092 19 nt Target #3: | 5′-CAUCGAUGUCUACAUGAUC-3′ | (SEQ ID NO: 3512) |
| EGFR-3093 19 nt Target #1: | 5′-CGAUGUCUACAUGAUCAUG-3′ | (SEQ ID NO: 2993) |
| EGFR-3093 19 nt Target #2: | 5′-UCGAUGUCUACAUGAUCAU-3′ | (SEQ ID NO: 3253) |
| EGFR-3093 19 nt Target #3: | 5′-AUCGAUGUCUACAUGAUCA-3′ | (SEQ ID NO: 3513) |
| EGFR-3094 19 nt Target #1: | 5′-GAUGUCUACAUGAUCAUGG-3′ | (SEQ ID NO: 2994) |
| EGFR-3094 19 nt Target #2: | 5′-CGAUGUCUACAUGAUCAUG-3′ | (SEQ ID NO: 3254) |
| EGFR-3094 19 nt Target #3: | 5′-UCGAUGUCUACAUGAUCAU-3′ | (SEQ ID NO: 3514) |
| EGFR-3095 19 nt Target #1: | 5′-AUGUCUACAUGAUCAUGGU-3′ | (SEQ ID NO: 2995) |
| EGFR-3095 19 nt Target #2: | 5′-GAUGUCUACAUGAUCAUGG-3′ | (SEQ ID NO: 3255) |
| EGFR-3095 19 nt Target #3: | 5′-CGAUGUCUACAUGAUCAUG-3′ | (SEQ ID NO: 3515) |
| EGFR-3096 19 nt Target #1: | 5′-UGUCUACAUGAUCAUGGUC-3′ | (SEQ ID NO: 2996) |
| EGFR-3096 19 nt Target #2: | 5′-AUGUCUACAUGAUCAUGGU-3′ | (SEQ ID NO: 3256) |
| EGFR-3096 19 nt Target #3: | 5′-GAUGUCUACAUGAUCAUGG-3′ | (SEQ ID NO: 3516) |
| EGFR-3097 19 nt Target #1: | 5′-GUCUACAUGAUCAUGGUCA-3′ | (SEQ ID NO: 2997) |
| EGFR-3097 19 nt Target #2: | 5′-UGUCUACAUGAUCAUGGUC-3′ | (SEQ ID NO: 3257) |
| EGFR-3097 19 nt Target #3: | 5′-AUGUCUACAUGAUCAUGGU-3′ | (SEQ ID NO: 3517) |
| EGFR-3098 19 nt Target #1: | 5′-UCUACAUGAUCAUGGUCAA-3′ | (SEQ ID NO: 2998) |
| EGFR-3098 19 nt Target #2: | 5′-GUCUACAUGAUCAUGGUCA-3′ | (SEQ ID NO: 3258) |
| EGFR-3098 19 nt Target #3: | 5′-UGUCUACAUGAUCAUGGUC-3′ | (SEQ ID NO: 3518) |
| EGFR-3099 19 nt Target #1: | 5′-CUACAUGAUCAUGGUCAAG-3′ | (SEQ ID NO: 2999) |
| EGFR-3099 19 nt Target #2: | 5′-UCUACAUGAUCAUGGUCAA-3′ | (SEQ ID NO: 3259) |
| EGFR-3099 19 nt Target #3: | 5′-GUCUACAUGAUCAUGGUCA-3′ | (SEQ ID NO: 3519) |
| EGFR-3100 19 nt Target #1: | 5′-UACAUGAUCAUGGUCAAGU-3′ | (SEQ ID NO: 3000) |
| EGFR-3100 19 nt Target #2: | 5′-CUACAUGAUCAUGGUCAAG-3′ | (SEQ ID NO: 3260) |
| EGFR-3100 19 nt Target #3: | 5′-UCUACAUGAUCAUGGUCAA-3′ | (SEQ ID NO: 3520) |
| EGFR-3101 19 nt Target #1: | 5′-ACAUGAUCAUGGUCAAGUG-3′ | (SEQ ID NO: 3001) |
| EGFR-3101 19 nt Target #2: | 5′-UACAUGAUCAUGGUCAAGU-3′ | (SEQ ID NO: 3261) |
| EGFR-3101 19 nt Target #3: | 5′-CUACAUGAUCAUGGUCAAG-3′ | (SEQ ID NO: 3521) |
| EGFR-3102 19 nt Target #1: | 5′-CAUGAUCAUGGUCAAGUGC-3′ | (SEQ ID NO: 3002) |
| EGFR-3102 19 nt Target #2: | 5′-ACAUGAUCAUGGUCAAGUG-3′ | (SEQ ID NO: 3262) |
| EGFR-3102 19 nt Target #3: | 5′-UACAUGAUCAUGGUCAAGU-3′ | (SEQ ID NO: 3522) |
| EGFR-3103 19 nt Target #1: | 5′-AUGAUCAUGGUCAAGUGCU-3′ | (SEQ ID NO: 3003) |
| EGFR-3103 19 nt Target #2: | 5′-CAUGAUCAUGGUCAAGUGC-3′ | (SEQ ID NO: 3263) |
| EGFR-3103 19 nt Target #3: | 5′-ACAUGAUCAUGGUCAAGUG-3′ | (SEQ ID NO: 3523) |
| EGFR-3104 19 nt Target #1: | 5′-UGAUCAUGGUCAAGUGCUG-3′ | (SEQ ID NO: 3004) |
| EGFR-3104 19 nt Target #2: | 5′-AUGAUCAUGGUCAAGUGCU-3′ | (SEQ ID NO: 3264) |
| EGFR-3104 19 nt Target #3: | 5′-CAUGAUCAUGGUCAAGUGC-3′ | (SEQ ID NO: 3524) |
| EGFR-3105 19 nt Target #1: | 5′-GAUCAUGGUCAAGUGCUGG-3′ | (SEQ ID NO: 3005) |
| EGFR-3105 19 nt Target #2: | 5′-UGAUCAUGGUCAAGUGCUG-3′ | (SEQ ID NO: 3265) |
| EGFR-3105 19 nt Target #3: | 5′-AUGAUCAUGGUCAAGUGCU-3′ | (SEQ ID NO: 3525) |
| EGFR-3106 19 nt Target #1: | 5′-AUCAUGGUCAAGUGCUGGA-3′ | (SEQ ID NO: 3006) |
| EGFR-3106 19 nt Target #2: | 5′-GAUCAUGGUCAAGUGCUGG-3′ | (SEQ ID NO: 3266) |
| EGFR-3106 19 nt Target #3: | 5′-UGAUCAUGGUCAAGUGCUG-3′ | (SEQ ID NO: 3526) |
| EGFR-3107 19 nt Target #1: | 5′-UCAUGGUCAAGUGCUGGAU-3′ | (SEQ ID NO: 3007) |
| EGFR-3107 19 nt Target #2: | 5′-AUCAUGGUCAAGUGCUGGA-3′ | (SEQ ID NO: 3267) |
| EGFR-3107 19 nt Target #3: | 5′-GAUCAUGGUCAAGUGCUGG-3′ | (SEQ ID NO: 3527) |
| EGFR-3108 19 nt Target #1: | 5′-CAUGGUCAAGUGCUGGAUG-3′ | (SEQ ID NO: 3008) |
| EGFR-3108 19 nt Target #2: | 5′-UCAUGGUCAAGUGCUGGAU-3′ | (SEQ ID NO: 3268) |
| EGFR-3108 19 nt Target #3: | 5′-AUCAUGGUCAAGUGCUGGA-3′ | (SEQ ID NO: 3528) |
| EGFR-3109 19 nt Target #1: | 5′-AUGGUCAAGUGCUGGAUGA-3′ | (SEQ ID NO: 3009) |
| EGFR-3109 19 nt Target #2: | 5′-CAUGGUCAAGUGCUGGAUG-3′ | (SEQ ID NO: 3269) |
| EGFR-3109 19 nt Target #3: | 5′-UCAUGGUCAAGUGCUGGAU-3′ | (SEQ ID NO: 3529) |
| EGFR-3110 19 nt Target #1: | 5′-UGGUCAAGUGCUGGAUGAU-3′ | (SEQ ID NO: 3010) |
| EGFR-3110 19 nt Target #2: | 5′-AUGGUCAAGUGCUGGAUGA-3′ | (SEQ ID NO: 3270) |
| EGFR-3110 19 nt Target #3: | 5′-CAUGGUCAAGUGCUGGAUG-3′ | (SEQ ID NO: 3530) |
| EGFR-3111 19 nt Target #1: | 5′-GGUCAAGUGCUGGAUGAUA-3′ | (SEQ ID NO: 3011) |
| EGFR-3111 19 nt Target #2: | 5′-UGGUCAAGUGCUGGAUGAU-3′ | (SEQ ID NO: 3271) |
| EGFR-3111 19 nt Target #3: | 5′-AUGGUCAAGUGCUGGAUGA-3′ | (SEQ ID NO: 3531) |
| EGFR-3112 19 nt Target #1: | 5′-GUCAAGUGCUGGAUGAUAG-3′ | (SEQ ID NO: 3012) |
| EGFR-3112 19 nt Target #2: | 5′-GGUCAAGUGCUGGAUGAUA-3′ | (SEQ ID NO: 3272) |
| EGFR-3112 19 nt Target #3: | 5′-UGGUCAAGUGCUGGAUGAU-3′ | (SEQ ID NO: 3532) |
| EGFR-3113 19 nt Target #1: | 5′-UCAAGUGCUGGAUGAUAGA-3′ | (SEQ ID NO: 3013) |
| EGFR-3113 19 nt Target #2: | 5′-GUCAAGUGCUGGAUGAUAG-3′ | (SEQ ID NO: 3273) |
| EGFR-3113 19 nt Target #3: | 5′-GGUCAAGUGCUGGAUGAUA-3′ | (SEQ ID NO: 3533) |
| EGFR-3169 19 nt Target #1: | 5′-GAAUUCUCCAAAAUGGCCC-3′ | (SEQ ID NO: 3014) |
| EGFR-3169 19 nt Target #2: | 5′-CGAAUUCUCCAAAAUGGCC-3′ | (SEQ ID NO: 3274) |
| EGFR-3169 19 nt Target #3: | 5′-UCGAAUUCUCCAAAAUGGC-3′ | (SEQ ID NO: 3534) |
| EGFR-3170 19 nt Target #1: | 5′-AAUUCUCCAAAAUGGCCCG-3′ | (SEQ ID NO: 3015) |
| EGFR-3170 19 nt Target #2: | 5′-GAAUUCUCCAAAAUGGCCC-3′ | (SEQ ID NO: 3275) |
| EGFR-3170 19 nt Target #3: | 5′-CGAAUUCUCCAAAAUGGCC-3′ | (SEQ ID NO: 3535) |
| EGFR-3220 19 nt Target #1: | 5′-GAUGAAAGAAUGCAUUUGC-3′ | (SEQ ID NO: 3016) |
| EGFR-3220 19 nt Target #2: | 5′-GGAUGAAAGAAUGCAUUUG-3′ | (SEQ ID NO: 3276) |
| EGFR-3220 19 nt Target #3: | 5′-GGGAUGAAAGAAUGCAUUU-3′ | (SEQ ID NO: 3536) |
| EGFR-3221 19 nt Target #1: | 5′-AUGAAAGAAUGCAUUUGCC-3′ | (SEQ ID NO: 3017) |
| EGFR-3221 19 nt Target #2: | 5′-GAUGAAAGAAUGCAUUUGC-3′ | (SEQ ID NO: 3277) |
| EGFR-3221 19 nt Target #3: | 5′-GGAUGAAAGAAUGCAUUUG-3′ | (SEQ ID NO: 3537) |
| EGFR-3222 19 nt Target #1: | 5′-UGAAAGAAUGCAUUUGCCA-3′ | (SEQ ID NO: 3018) |
| EGFR-3222 19 nt Target #2: | 5′-AUGAAAGAAUGCAUUUGCC-3′ | (SEQ ID NO: 3278) |
| EGFR-3222 19 nt Target #3: | 5′-GAUGAAAGAAUGCAUUUGC-3′ | (SEQ ID NO: 3538) |
| EGFR-3223 19 nt Target #1: | 5′-GAAAGAAUGCAUUUGCCAA-3′ | (SEQ ID NO: 3019) |
| EGFR-3223 19 nt Target #2: | 5′-UGAAAGAAUGCAUUUGCCA-3′ | (SEQ ID NO: 3279) |
| EGFR-3223 19 nt Target #3: | 5′-AUGAAAGAAUGCAUUUGCC-3′ | (SEQ ID NO: 3539) |
| EGFR-3224 19 nt Target #1: | 5′-AAAGAAUGCAUUUGCCAAG-3′ | (SEQ ID NO: 3020) |
| EGFR-3224 19 nt Target #2: | 5′-GAAAGAAUGCAUUUGCCAA-3′ | (SEQ ID NO: 3280) |
| EGFR-3224 19 nt Target #3: | 5′-UGAAAGAAUGCAUUUGCCA-3′ | (SEQ ID NO: 3540) |
| EGFR-3772 19 nt Target #1: | 5′-GACAACCCUGACUACCAGC-3′ | (SEQ ID NO: 3021) |
| EGFR-3772 19 nt Target #2: | 5′-GGACAACCCUGACUACCAG-3′ | (SEQ ID NO: 3281) |
| EGFR-3772 19 nt Target #3: | 5′-UGGACAACCCUGACUACCA-3′ | (SEQ ID NO: 3541) |
| EGFR-3773 19 nt Target #1: | 5′-ACAACCCUGACUACCAGCA-3′ | (SEQ ID NO: 3022) |
| EGFR-3773 19 nt Target #2: | 5′-GACAACCCUGACUACCAGC-3′ | (SEQ ID NO: 3282) |
| EGFR-3773 19 nt Target #3: | 5′-GGACAACCCUGACUACCAG-3′ | (SEQ ID NO: 3542) |
| EGFR-3774 19 nt Target #1: | 5′-CAACCCUGACUACCAGCAG-3′ | (SEQ ID NO: 3023) |
| EGFR-3774 19 nt Target #2: | 5′-ACAACCCUGACUACCAGCA-3′ | (SEQ ID NO: 3283) |
| EGFR-3774 19 nt Target #3: | 5′-GACAACCCUGACUACCAGC-3′ | (SEQ ID NO: 3543) |
| EGFR-3775 19 nt Target #1: | 5′-AACCCUGACUACCAGCAGG-3′ | (SEQ ID NO: 3024) |
| EGFR-3775 19 nt Target #2: | 5′-CAACCCUGACUACCAGCAG-3′ | (SEQ ID NO: 3284) |
| EGFR-3775 19 nt Target #3: | 5′-ACAACCCUGACUACCAGCA-3′ | (SEQ ID NO: 3544) |
| EGFR-3776 19 nt Target #1: | 5′-ACCCUGACUACCAGCAGGA-3′ | (SEQ ID NO: 3025) |
| EGFR-3776 19 nt Target #2: | 5′-AACCCUGACUACCAGCAGG-3′ | (SEQ ID NO: 3285) |
| EGFR-3776 19 nt Target #3: | 5′-CAACCCUGACUACCAGCAG-3′ | (SEQ ID NO: 3545) |
| EGFR-3777 19 nt Target #1: | 5′-CCCUGACUACCAGCAGGAC-3′ | (SEQ ID NO: 3026) |
| EGFR-3777 19 nt Target #2: | 5′-ACCCUGACUACCAGCAGGA-3′ | (SEQ ID NO: 3286) |
| EGFR-3777 19 nt Target #3: | 5′-AACCCUGACUACCAGCAGG-3′ | (SEQ ID NO: 3546) |
| EGFR-3778 19 nt Target #1: | 5′-CCUGACUACCAGCAGGACU-3′ | (SEQ ID NO: 3027) |
| EGFR-3778 19 nt Target #2: | 5′-CCCUGACUACCAGCAGGAC-3′ | (SEQ ID NO: 3287) |
| EGFR-3778 19 nt Target #3: | 5′-ACCCUGACUACCAGCAGGA-3′ | (SEQ ID NO: 3547) |
| EGFR-3779 19 nt Target #1: | 5′-CUGACUACCAGCAGGACUU-3′ | (SEQ ID NO: 3028) |
| EGFR-3779 19 nt Target #2: | 5′-CCUGACUACCAGCAGGACU-3′ | (SEQ ID NO: 3288) |
| EGFR-3779 19 nt Target #3: | 5′-CCCUGACUACCAGCAGGAC-3′ | (SEQ ID NO: 3548) |

TABLE 7
Selected Human Anti-EGFR “Blunt/Fray” DsiRNAs

[chemical structure]

EGFR-31 Target: 5′-GGCGCAGCGCGGCCGCAGCAGCCTCCG-3′ (SEQ ID NO: 713)

[chemical structure]

EGFR-32 Target: 5′-GCGCAGCGCGGCCGCAGCAGCCTCCGC-3′ (SEQ ID NO: 714)

[chemical structure]

EGFR-34 Target: 5′-GCAGCGCGGCCGCAGCAGCCTCCGCCC-3′ (SEQ ID NO: 715)

[chemical structure]

EGFR-298 Target: 5′-CAGCGCTCCTGGCGCTGCTGGCTGCGC-3′ (SEQ ID NO: 716)

[chemical structure]

EGFR-300 Target: 5′-GCGCTCCTGGCGCTGCTGGCTGCGCTC-3′ (SEQ ID NO: 717)

[chemical structure]

EGFR-302 Target: 5′-GCTCCTGGCGCTGCTGGCTGCGCTCTG-3′ (SEQ ID NO: 718)

[chemical structure]

EGFR-390 Target: 5′-CAGTTGGGCACTTTTGAAGATCATTTT-3′ (SEQ ID NO: 719)

[chemical structure]

EGFR-458 Target: 5′-TGGGAATTTGGAAATTACCTATGTGCA-3′ (SEQ ID NO: 720)

[chemical structure]

EGFR-489 Target: 5′-AATTATGATCTTTCCTTCTTAAAGACC-3′ (SEQ ID NO: 721)

[chemical structure]

EGFR-525 Target: 5′-GTGGCTGGTTATGTCCTCATTGCCCTC-3′ (SEQ ID NO: 722)

[chemical structure]

EGFR-676 Target: 5′-TGCCCATGAGAAATTTACAGGAAATCC-3′ (SEQ ID NO: 723)

[chemical structure]

EGFR-701 Target: 5′-CCTGCATGGCGCCGTGCGGTTCAGCAA-3′ (SEQ ID NO: 724)

[chemical structure]

EGFR-707 Target: 5′-TGGCGCCGTGCGGTTCAGCAACAACCC-3′ (SEQ ID NO: 725)

[chemical structure]

EGFR-707 Target: 5′-TGGCGCCGTGCGGTTCAGCAACAACCC-3′ (SEQ ID NO: 726)

[chemical structure]

EGFR-709 Target: 5′-GCGCCGTGCGGTTCAGCAACAACCCTG-3′ (SEQ ID NO: 727)

[chemical structure]

EGFR-710 Target: 5′-CGCCGTGCGGTTCAGCAACAACCCTGC-3′ (SEQ ID NO: 728)

[chemical structure]

EGFR-827 Target: 5′-CAGCTGCCAAAAGTGTGATCCAAGCTG-3′ (SEQ ID NO: 729)

[chemical structure]

EGFR-912 Target: 5′-ATCTGTGCCCAGCAGTGCTCCGGGCGC-3′ (SEQ ID NO: 730)

[chemical structure]

EGFR-914 Target: 5′-CTGTGCCCAGCAGTGCTCCGGGCGCTG-3′ (SEQ ID NO: 731)

[chemical structure]

EGFR-926 Target: 5′-GTGCTCCGGGCGCTGCCGTGGCAAGTC-3′ (SEQ ID NO: 732)

[chemical structure]

EGFR-1005 Target: 5′-GAGAGCGACTGCCTGGTCTGCCGCAAA-3′ (SEQ ID NO: 733)

[chemical structure]

EGFR-1013 Target: 5′-CTGCCTGGTCTGCCGCAAATTCCGAGA-3′ (SEQ ID NO: 734)

[chemical structure]

EGFR-1175 Target: 5′-GACAGATCACGGCTCGTGCGTCCGAGC-3′ (SEQ ID NO: 735)

[chemical structure]

EGFR-1271 Target: 5′-CCGCAAAGTGTGTAACGGAATAGGTAT-3′ (SEQ ID NO: 736)

[chemical structure]

EGFR-1286 Target: 5′-CGGAATAGGTATTGGTGAATTTAAAGA-3′ (SEQ ID NO: 737)

[chemical structure]

EGFR-1330 Target: 5′-CTACGAATATTAAACACTTCAAAAACT-3′ (SEQ ID NO: 738)

[chemical structure]

EGFR-1437 Target: 5′-CCACAGGAACTGGATATTCTGAAAACC-3′ (SEQ ID NO: 739)

[chemical structure]

EGFR-1475 Target: 5′-CACAGGGTTTTTGCTGATTCAGGCTTG-3′ (SEQ ID NO: 740)

[chemical structure]

EGFR-1661 Target: 5′-TTCAGGAAACAAAAATTTGTGCTATGC-3′ (SEQ ID NO: 741)

[chemical structure]

EGFR-1679 Target: 5′-GTGCTATGCAAATACAATAAACTGGAA-3′ (SEQ ID NO: 742)

[chemical structure]

EGFR-1723 Target: 5′-CCGGTCAGAAAACCAAAATTATAAGCA-3′ (SEQ ID NO: 743)

[chemical structure]

EGFR-1838 Target: 5′-CTGCGTCTCTTGCCGGAATGTCAGCCG-3′ (SEQ ID NO: 744)

[chemical structure]

EGFR-2227 Target: 5′-GGGCCCTCCTCTTGCTGCTGGTGGTGG-3′ (SEQ ID NO: 745)

[chemical structure]

EGFR-2228 Target: 5′-GGCCCTCCTCTTGCTGCTGGTGGTGGC-3′ (SEQ ID NO: 746)

[chemical structure]

EGFR-2232 Target: 5′-CTCCTCTTGCTGCTGGTGGTGGCCCTG-3′ (SEQ ID NO: 747)

[chemical structure]

EGFR-2233 Target: 5′-TCCTCTTGCTGCTGGTGGTGGCCCTGG-3′ (SEQ ID NO: 748)

[chemical structure]

EGFR-2295 Target: 5′-CGGAAGCGCACGCTGCGGAGGCTGCTG-3′ (SEQ ID NO: 749)

[chemical structure]

EGFR-2298 Target: 5′-AAGCGCACGCTGCGGAGGCTGCTGCAG-3′ (SEQ ID NO: 750)

[chemical structure]

EGFR-2399 Target: 5′-AACTGAATTCAAAAAGATCAAAGTGCT-3′ (SEQ ID NO: 751)

[chemical structure]

EGFR-2417 Target: 5′-CAAAGTGCTGGGCTCCGGTGCGTTCGG-3′ (SEQ ID NO: 752)

[chemical structure]

EGFR-2419 Target: 5′-AAGTGCTGGGCTCCGGTGCGTTCGGCA-3′ (SEQ ID NO: 753)

[chemical structure]

EGFR-2420 Target: 5′-AGTGCTGGGCTCCGGTGCGTTCGGCAC-3′ (SEQ ID NO: 754)

[chemical structure]

EGFR-2421 Target: 5′-GTGCTGGGCTCCGGTGCGTTCGGCACG-3′ (SEQ ID NO: 755)

[chemical structure]

EGFR-2422 Target: 5′-TGCTGGGCTCCGGTGCGTTCGGCACGG-3′ (SEQ ID NO: 756)

[chemical structure]

EGFR-2591 Target: 5′-CGTGTGCCGCCTGCTGGGCATCTGCCT-3′ (SEQ ID NO: 757)

[chemical structure]

EGFR-2592 Target: 5′-GTGTGCCGCCTGCTGGGCATCTGCCTC-3′ (SEQ ID NO: 758)

[chemical structure]

EGFR-2594 Target: 5′-GTGCCGCCTGCTGGGCATCTGCCTCAC-3′ (SEQ ID NO: 759)

[chemical structure]

EGFR-2624 Target: 5′-CACCGTGCAGCTCATCACGCAGCTCAT-3′ (SEQ ID NO: 760)

[chemical structure]

EGFR-2627 Target: 5′-CGTGCAGCTCATCACGCAGCTCATGCC-3′ (SEQ ID NO: 761)

[chemical structure]

EGFR-2631 Target: 5′-CAGCTCATCACGCAGCTCATGCCCTTC-3′ (SEQ ID NO: 762)

[chemical structure]

EGFR-2632 Target: 5′-AGCTCATCACGCAGCTCATGCCCTTCG-3′ (SEQ ID NO: 763)

[chemical structure]

EGFR-2643 Target: 5′-CAGCTCATGCCCTTCGGCTGCCTCCTG-3′ (SEQ ID NO: 764)

[chemical structure]

EGFR-2644 Target: 5′-AGCTCATGCCCTTCGGCTGCCTCCTGG-3′ (SEQ ID NO: 765)

[chemical structure]

EGFR-2754 Target: 5′-TTGGAGGACCGTCGCTTGGTGCACCGC-3′ (SEQ ID NO: 766)

[chemical structure]

EGFR-2756 Target: 5′-GGAGGACCGTCGCTTGGTGCACCGCGA-3′ (SEQ ID NO: 767)

[chemical structure]

EGFR-2757 Target: 5′-GAGGACCGTCGCTTGGTGCACCGCGAC-3′ (SEQ ID NO: 768)

[chemical structure]

EGFR-2758 Target: 5′-AGGACCGTCGCTTGGTGCACCGCGACC-3′ (SEQ ID NO: 769)

[chemical structure]

EGFR-2760 Target: 5′-GACCGTCGCTTGGTGCACCGCGACCTG-3′ (SEQ ID NO: 770)

[chemical structure]

EGFR-2762 Target: 5′-CCGTCGCTTGGTGCACCGCGACCTGGC-3′ (SEQ ID NO: 771)

[chemical structure]

EGFR-2764 Target: 5′-GTCGCTTGGTGCACCGCGACCTGGCAG-3′ (SEQ ID NO: 772)

[chemical structure]

EGFR-2765 Target: 5′-TCGCTTGGTGCACCGCGACCTGGCAGC-3′ (SEQ ID NO: 773)

[chemical structure]

EGFR-2767 Target: 5′-GCTTGGTGCACCGCGACCTGGCAGCCA-3′ (SEQ ID NO: 774)

[chemical structure]

EGFR-2915 Target: 5′-GGCATTGGAATCAATTTTACACAGAAT-3′ (SEQ ID NO: 775)

[chemical structure]

EGFR-3115 Target: 5′-TCAAGTGCTGGATGATAGACGCAGATA-3′ (SEQ ID NO: 776)

[chemical structure]

EGFR-3117 Target: 5′-AAGTGCTGGATGATAGACGCAGATAGT-3′ (SEQ ID NO: 777)

[chemical structure]

EGFR-3118 Target: 5′-AGTGCTGGATGATAGACGCAGATAGTC-3′ (SEQ ID NO: 778)

[chemical structure]

EGFR-3120 Target: 5′-TGCTGGATGATAGACGCAGATAGTCGC-3′ (SEQ ID NO: 779)

[chemical structure]

EGFR-3372 Target: 5′-CTCCTGAGCTCTCTGAGTGCAACCAGC-3′ (SEQ ID NO: 780)

[chemical structure]

EGFR-3375 Target: 5′-CTGAGCTCTCTGAGTGCAACCAGCAAC-3′ (SEQ ID NO: 781)

[chemical structure]

EGFR-3440 Target: 5′-AAGCTGTCCCATCAAGGAAGACAGCTT-3′ (SEQ ID NO: 782)

[chemical structure]

EGFR-3441 Target: 5′-AGCTGTCCCATCAAGGAAGACAGCTTC-3′ (SEQ ID NO: 783)

[chemical structure]

EGFR-3457 Target: 5′-AAGACAGCTTCTTGCAGCGATACAGCT-3′ (SEQ ID NO: 784)

[chemical structure]

EGFR-3458 Target: 5′-AGACAGCTTCTTGCAGCGATACAGCTC-3′ (SEQ ID NO: 785)

[chemical structure]

EGFR-3459 Target: 5′-GACAGCTTCTTGCAGCGATACAGCTCA-3′ (SEQ ID NO: 786)

[chemical structure]

EGFR-3460 Target: 5′-ACAGCTTCTTGCAGCGATACAGCTCAG-3′ (SEQ ID NO: 787)

[chemical structure]

EGFR-3461 Target: 5′-CAGCTTCTTGCAGCGATACAGCTCAGA-3′ (SEQ ID NO: 788)

[chemical structure]

EGFR-3463 Target: 5′-GCTTCTTGCAGCGATACAGCTCAGACC-3′ (SEQ ID NO: 789)

[chemical structure]

EGFR-3876 Target: 5′-CCACAAAGCAGTGAATTTATTGGAGCA-3′ (SEQ ID NO: 790)

[chemical structure]

EGFR-4178 Target: 5′-GTATATTTGAAAAAAAAAAAAAGTATA-3′ (SEQ ID NO: 791)

[chemical structure]

EGFR-4205 Target: 5′-TGTGAGGATTTTTATTGATTGGGGATC-3′ (SEQ ID NO: 792)

[chemical structure]

EGFR-4249 Target: 5′-CGCTATTGATTTTTACTTCAATGGGCT-3′ (SEQ ID NO: 793)

[chemical structure]

EGFR-4284 Target: 5′-AAGGAAGAAGCTTGCTGGTAGCACTTG-3′ (SEQ ID NO: 794)

[chemical structure]

EGFR-4285 Target: 5′-AGGAAGAAGCTTGCTGGTAGCACTTGC-3′ (SEQ ID NO: 795)

[chemical structure]

EGFR-4286 Target: 5′-GGAAGAAGCTTGCTGGTAGCACTTGCT-3′ (SEQ ID NO: 796)

[chemical structure]

EGFR-4287 Target: 5′-GAAGAAGCTTGCTGGTAGCACTTGCTA-3′ (SEQ ID NO: 797)

[chemical structure]

EGFR-4288 Target: 5′-AAGAAGCTTGCTGGTAGCACTTGCTAC-3′ (SEQ ID NO: 798)

[chemical structure]

EGFR-4290 Target: 5′-GAAGCTTGCTGGTAGCACTTGCTACCC-3′ (SEQ ID NO: 799)

[chemical structure]

EGFR-4291 Target: 5′-AAGCTTGCTGGTAGCACTTGCTACCCT-3′ (SEQ ID NO: 800)

[chemical structure]

EGFR-4292 Target: 5′-AGCTTGCTGGTAGCACTTGCTACCCTG-3′ (SEQ ID NO: 801)

[chemical structure]

EGFR-4293 Target: 5′-GCTTGCTGGTAGCACTTGCTACCCTGA-3′ (SEQ ID NO: 802)

[chemical structure]

EGFR-4294 Target: 5′-CTTGCTGGTAGCACTTGCTACCCTGAG-3′ (SEQ ID NO: 803)

[chemical structure]

EGFR-4295 Target: 5′-TTGCTGGTAGCACTTGCTACCCTGAGT-3′ (SEQ ID NO: 804)

[chemical structure]

EGFR-4372 Target: 5′-GGATGCTTGATTCCAGTGGTTCTGCTT-3′ (SEQ ID NO: 805)

[chemical structure]

EGFR-4373 Target: 5′-GATGCTTGATTCCAGTGGTTCTGCTTC-3′ (SEQ ID NO: 806)

[chemical structure]

EGFR-4450 Target: 5′-AGCAGGCCGGATCGGTACTGTATCAAG-3′ (SEQ ID NO: 807)

[chemical structure]

EGFR-4455 Target: 5′-GCCGGATCGGTACTGTATCAAGTCATG-3′ (SEQ ID NO: 808)

[chemical structure]

EGFR-4550 Target: 5′-TCCTTAGACTTACTTTTGTAAAAATGT-3′ (SEQ ID NO: 809)

[chemical structure]

EGFR-4684 Target: 5′-CTGTCTTGCTGTCATGAAATCAGCAAG-3′ (SEQ ID NO: 810)

[chemical structure]

EGFR-4804 Target: 5′-CCTAAGGATAGCACCGCTTTTGTTCTC-3′ (SEQ ID NO: 811)

[chemical structure]

EGFR-4806 Target: 5′-TAAGGATAGCACCGCTTTTGTTCTCGC-3′ (SEQ ID NO: 812)

[chemical structure]

EGFR-4807 Target: 5′-AAGGATAGCACCGCTTTTGTTCTCGCA-3′ (SEQ ID NO: 813)

[chemical structure]

EGFR-4808 Target: 5′-AGGATAGCACCGCTTTTGTTCTCGCAA-3′ (SEQ ID NO: 814)

[chemical structure]

EGFR-4809 Target: 5′-GGATAGCACCGCTTTTGTTCTCGCAAA-3′ (SEQ ID NO: 815)

[chemical structure]

EGFR-4810 Target: 5′-GATAGCACCGCTTTTGTTCTCGCAAAA-3′ (SEQ ID NO: 816)

[chemical structure]

EGFR-4811 Target: 5′-ATAGCACCGCTTTTGTTCTCGCAAAAA-3′ (SEQ ID NO: 817)

[chemical structure]

EGFR-4812 Target: 5′-TAGCACCGCTTTTGTTCTCGCAAAAAC-3′ (SEQ ID NO: 818)

[chemical structure]

EGFR-4813 Target: 5′-AGCACCGCTTTTGTTCTCGCAAAAACG-3′ (SEQ ID NO: 819)

[chemical structure]

EGFR-4816 Target: 5′-ACCGCTTTTGTTCTCGCAAAAACGTAT-3′ (SEQ ID NO: 820)

[chemical structure]

EGFR-4817 Target: 5′-CCGCTTTTGTTCTCGCAAAAACGTATC-3′ (SEQ ID NO: 821)

[chemical structure]

EGFR-4818 Target: 5′-CGCTTTTGTTCTCGCAAAAACGTATCT-3′ (SEQ ID NO: 822)

[chemical structure]

EGFR-4819 Target: 5′-GCTTTTGTTCTCGCAAAAACGTATCTC-3′ (SEQ ID NO: 823)

[chemical structure]

EGFR-4824 Target: 5′-TGTTCTCGCAAAAACGTATCTCCTAAT-3′ (SEQ ID NO: 824)

[chemical structure]

EGFR-4953 Target: 5′-CAAAATTAGTTTGTGTTACTTATGGAA-3′ (SEQ ID NO: 825)

[chemical structure]

EGFR-4970 Target: 5′-ACTTATGGAAGATAGTTTTCTCCTTTT-3′ (SEQ ID NO: 826)

[chemical structure]

EGFR-5003 Target: 5′-CTTCAAAAGCTTTTTACTCAAAGAGTA-3′ (SEQ ID NO: 827)

[chemical structure]

EGFR-5206 Target: 5′-AAACTAGGGTTTGAAATTGATAATGCT-3′ (SEQ ID NO: 828)

[chemical structure]

EGFR-5275 Target: 5′-CCTAAAATAATTTCTCTACAATTGGAA-3′ (SEQ ID NO: 829)

[chemical structure]

EGFR-5374 Target: 5′-AACAGCAGTCCTTTGTAAACAGTGTTT-3′ (SEQ ID NO: 830)

[chemical structure]

EGFR-5429 Target: 5′-TCCAATTTATCAAGGAAGAAATGGTTC-3′ (SEQ ID NO: 831)

[chemical structure]

EGFR-5497 Target: 5′-CATACAAAATGTTCCTTTTGCTTTTAA-3′ (SEQ ID NO: 832)

[chemical structure]

EGFR-5505 Target: 5′-ATGTTCCTTTTGCTTTTAAAGTAATTT-3′ (SEQ ID NO: 833)

[chemical structure]

EGFR-5506 Target: 5′-TGTTCCTTTTGCTTTTAAAGTAATTTT-3′ (SEQ ID NO: 834)

[chemical structure]

EGFR-5512 Target: 5′-TTTTGCTTTTAAAGTAATTTTTGACTC-3′ (SEQ ID NO: 835)

[chemical structure]

EGFR-5565 Target: 5′-TTGTTAAGAAAGTATTTGATTTTTGTC-3′ (SEQ ID NO: 836)

[chemical structure]

EGFR-463 Target: 5′-ATTTGGAAATTACCTATGTGCAGAGGA-3′ (SEQ ID NO: 837)

[chemical structure]

EGFR-464 Target: 5′-TTTGGAAATTACCTATGTGCAGAGGAA-3′ (SEQ ID NO: 838)

[chemical structure]

EGFR-496 Target: 5′-ATCTTTCCTTCTTAAAGACCATCCAGG-3′ (SEQ ID NO: 839)

[chemical structure]

EGFR-497 Target: 5′-TCTTTCCTTCTTAAAGACCATCCAGGA-3′ (SEQ ID NO: 840)

[chemical structure]

EGFR-498 Target: 5′-CTTTCCTTCTTAAAGACCATCCAGGAG-3′ (SEQ ID NO: 841)

[chemical structure]

EGFR-499 Target: 5′-TTTCCTTCTTAAAGACCATCCAGGAGG-3′ (SEQ ID NO: 842)

[chemical structure]

EGFR-500 Target: 5′-TTCCTTCTTAAAGACCATCCAGGAGGT-3′ (SEQ ID NO: 843)

[chemical structure]

EGFR-501 Target: 5′-TCCTTCTTAAAGACCATCCAGGAGGTG-3′ (SEQ ID NO: 844)

[chemical structure]

EGFR-502 Target: 5′-CCTTCTTAAAGACCATCCAGGAGGTGG-3′ (SEQ ID NO: 845)

[chemical structure]

EGFR-503 Target: 5′-CTTCTTAAAGACCATCCAGGAGGTGGC-3′ (SEQ ID NO: 846)

[chemical structure]

EGFR-504 Target: 5′-TTCTTAAAGACCATCCAGGAGGTGGCT-3′ (SEQ ID NO: 847)

[chemical structure]

EGFR-505 Target: 5′-TCTTAAAGACCATCCAGGAGGTGGCTG-3′ (SEQ ID NO: 848)

[chemical structure]

EGFR-506 Target: 5′-CTTAAAGACCATCCAGGAGGTGGCTGG-3′ (SEQ ID NO: 849)

[chemical structure]

EGFR-507 Target: 5′-TTAAAGACCATCCAGGAGGTGGCTGGT-3′ (SEQ ID NO: 850)

[chemical structure]

EGFR-508 Target: 5′-TAAAGACCATCCAGGAGGTGGCTGGTT-3′ (SEQ ID NO: 851)

[chemical structure]

EGFR-509 Target: 5′-AAAGACCATCCAGGAGGTGGCTGGTTA-3′ (SEQ ID NO: 852)

[chemical structure]

EGFR-838 Target: 5′-AGTGTGATCCAAGCTGTCCCAATGGGA-3′ (SEQ ID NO: 853)

[chemical structure]

EGFR-839 Target: 5′-GTGTGATCCAAGCTGTCCCAATGGGAG-3′ (SEQ ID NO: 854)

[chemical structure]

EGFR-840 Target: 5′-TGTGATCCAAGCTGTCCCAATGGGAGC-3′ (SEQ ID NO: 855)

[chemical structure]

EGFR-841 Target: 5′-GTGATCCAAGCTGTCCCAATGGGAGCT-3′ (SEQ ID NO: 856)

[chemical structure]

EGFR-842 Target: 5′-TGATCCAAGCTGTCCCAATGGGAGCTG-3′ (SEQ ID NO: 857)

[chemical structure]

EGFR-876 Target: 5′-GCAGGAGAGGAGAACTGCCAGAAACTG-3′ (SEQ ID NO: 858)

[chemical structure]

EGFR-877 Target: 5′-CAGGAGAGGAGAACTGCCAGAAACTGA-3′ (SEQ ID NO: 859)

[chemical structure]

EGFR-878 Target: 5′-AGGAGAGGAGAACTGCCAGAAACTGAC-3′ (SEQ ID NO: 860)

[chemical structure]

EGFR-879 Target: 5′-GGAGAGGAGAACTGCCAGAAACTGACC-3′ (SEQ ID NO: 861)

[chemical structure]

EGFR-899 Target: 5′-ACTGACCAAAATCATCTGTGCCCAGCA-3′ (SEQ ID NO: 862)

[chemical structure]

EGFR-900 Target: 5′-CTGACCAAAATCATCTGTGCCCAGCAG-3′ (SEQ ID NO: 863)

[chemical structure]

EGFR-901 Target: 5′-TGACCAAAATCATCTGTGCCCAGCAGT-3′ (SEQ ID NO: 864)

[chemical structure]

EGFR-902 Target: 5′-GACCAAAATCATCTGTGCCCAGCAGTG-3′ (SEQ ID NO: 865)

[chemical structure]

EGFR-903 Target: 5′-ACCAAAATCATCTGTGCCCAGCAGTGC-3′ (SEQ ID NO: 866)

[chemical structure]

EGFR-904 Target: 5′-CCAAAATCATCTGTGCCCAGCAGTGCT-3′ (SEQ ID NO: 867)

[chemical structure]

EGFR-905 Target: 5′-CAAAATCATCTGTGCCCAGCAGTGCTC-3′ (SEQ ID NO: 868)

[chemical structure]

EGFR-954 Target: 5′-CCCAGTGACTGCTGCCACAACCAGTGT-3′ (SEQ ID NO: 869)

[chemical structure]

EGFR-955 Target: 5′-CCAGTGACTGCTGCCACAACCAGTGTG-3′ (SEQ ID NO: 870)

[chemical structure]

EGFR-956 Target: 5′-CAGTGACTGCTGCCACAACCAGTGTGC-3′ (SEQ ID NO: 871)

[chemical structure]

EGFR-1313 Target: 5′-CTCACTCTCCATAAATGCTACGAATAT-3′ (SEQ ID NO: 872)

[chemical structure]

EGFR-1480 Target: 5′-GGTTTTTGCTGATTCAGGCTTGGCCTG-3′ (SEQ ID NO: 873)

[chemical structure]

EGFR-1481 Target: 5′-GTTTTTGCTGATTCAGGCTTGGCCTGA-3′ (SEQ ID NO: 874)

[chemical structure]

EGFR-1482 Target: 5′-TTTTTGCTGATTCAGGCTTGGCCTGAA-3′ (SEQ ID NO: 875)

[chemical structure]

EGFR-1483 Target: 5′-TTTTGCTGATTCAGGCTTGGCCTGAAA-3′ (SEQ ID NO: 876)

[chemical structure]

EGFR-1484 Target: 5′-TTTGCTGATTCAGGCTTGGCCTGAAAA-3′ (SEQ ID NO: 877)

[chemical structure]

EGFR-1485 Target: 5′-TTGCTGATTCAGGCTTGGCCTGAAAAC-3′ (SEQ ID NO: 878)

[chemical structure]

EGFR-1486 Target: 5′-TGCTGATTCAGGCTTGGCCTGAAAACA-3′ (SEQ ID NO: 879)

[chemical structure]

EGFR-1487 Target: 5′-GCTGATTCAGGCTTGGCCTGAAAACAG-3′ (SEQ ID NO: 880)

[chemical structure]

EGFR-1561 Target: 5′-CCAAGCAACATGGTCAGTTTTCTCTTG-3′ (SEQ ID NO: 881)

[chemical structure]

EGFR-1562 Target: 5′-CAAGCAACATGGTCAGTTTTCTCTTGC-3′ (SEQ ID NO: 882)

[chemical structure]

EGFR-1563 Target: 5′-AAGCAACATGGTCAGTTTTCTCTTGCA-3′ (SEQ ID NO: 883)

[chemical structure]

EGFR-1691 Target: 5′-TACAATAAACTGGAAAAAACTGTTTGG-3′ (SEQ ID NO: 884)

[chemical structure]

EGFR-1963 Target: 5′-CTCAGGCCATGAACATCACCTGCACAG-3′ (SEQ ID NO: 885)

[chemical structure]

EGFR-1964 Target: 5′-TCAGGCCATGAACATCACCTGCACAGG-3′ (SEQ ID NO: 886)

[chemical structure]

EGFR-2008 Target: 5′-GTATCCAGTGTGCCCACTACATTGACG-3′ (SEQ ID NO: 887)

[chemical structure]

EGFR-2009 Target: 5′-TATCCAGTGTGCCCACTACATTGACGG-3′ (SEQ ID NO: 888)

[chemical structure]

EGFR-2010 Target: 5′-ATCCAGTGTGCCCACTACATTGACGGC-3′ (SEQ ID NO: 889)

[chemical structure]

EGFR-2011 Target: 5′-TCCAGTGTGCCCACTACATTGACGGCC-3′ (SEQ ID NO: 890)

[chemical structure]

EGFR-2012 Target: 5′-CCAGTGTGCCCACTACATTGACGGCCC-3′ (SEQ ID NO: 891)

[chemical structure]

EGFR-2401 Target: 5′-CTGAATTCAAAAAGATCAAAGTGCTGG-3′ (SEQ ID NO: 892)

[chemical structure]

EGFR-2402 Target: 5′-TGAATTCAAAAAGATCAAAGTGCTGGG-3′ (SEQ ID NO: 893)

[chemical structure]

EGFR-2458 Target: 5′-GACTCTGGATCCCAGAAGGTGAGAAAG-3′ (SEQ ID NO: 894)

[chemical structure]

EGFR-2459 Target: 5′-ACTCTGGATCCCAGAAGGTGAGAAAGT-3′ (SEQ ID NO: 895)

[chemical structure]

EGFR-2460 Target: 5′-CTCTGGATCCCAGAAGGTGAGAAAGTT-3′ (SEQ ID NO: 896)

[chemical structure]

EGFR-2461 Target: 5′-TCTGGATCCCAGAAGGTGAGAAAGTTA-3′ (SEQ ID NO: 897)

[chemical structure]

EGFR-2462 Target: 5′-CTGGATCCCAGAAGGTGAGAAAGTTAA-3′ (SEQ ID NO: 898)

[chemical structure]

EGFR-2463 Target: 5′-TGGATCCCAGAAGGTGAGAAAGTTAAA-3′ (SEQ ID NO: 899)

[chemical structure]

EGFR-2464 Target: 5′-GGATCCCAGAAGGTGAGAAAGTTAAAA-3′ (SEQ ID NO: 900)

[chemical structure]

EGFR-2465 Target: 5′-GATCCCAGAAGGTGAGAAAGTTAAAAT-3′ (SEQ ID NO: 901)

[chemical structure]

EGFR-2815 Target: 5′-CGCAGCATGTCAAGATCACAGATTTTG-3′ (SEQ ID NO: 902)

[chemical structure]

EGFR-2816 Target: 5′-GCAGCATGTCAAGATCACAGATTTTGG-3′ (SEQ ID NO: 903)

[chemical structure]

EGFR-2817 Target: 5′-CAGCATGTCAAGATCACAGATTTTGGG-3′ (SEQ ID NO: 904)

[chemical structure]

EGFR-2818 Target: 5′-AGCATGTCAAGATCACAGATTTTGGGC-3′ (SEQ ID NO: 905)

[chemical structure]

EGFR-2819 Target: 5′-GCATGTCAAGATCACAGATTTTGGGCT-3′ (SEQ ID NO: 906)

[chemical structure]

EGFR-2820 Target: 5′-CATGTCAAGATCACAGATTTTGGGCTG-3′ (SEQ ID NO: 907)

[chemical structure]

EGFR-2821 Target: 5′-ATGTCAAGATCACAGATTTTGGGCTGG-3′ (SEQ ID NO: 908)

[chemical structure]

EGFR-2822 Target: 5′-TGTCAAGATCACAGATTTTGGGCTGGC-3′ (SEQ ID NO: 909)

[chemical structure]

EGFR-2823 Target: 5′-GTCAAGATCACAGATTTTGGGCTGGCC-3′ (SEQ ID NO: 910)

[chemical structure]

EGFR-2824 Target: 5′-TCAAGATCACAGATTTTGGGCTGGCCA-3′ (SEQ ID NO: 911)

[chemical structure]

EGFR-2825 Target: 5′-CAAGATCACAGATTTTGGGCTGGCCAA-3′ (SEQ ID NO: 912)

[chemical structure]

EGFR-2826 Target: 5′-AAGATCACAGATTTTGGGCTGGCCAAA-3′ (SEQ ID NO: 913)

[chemical structure]

EGFR-2827 Target: 5′-AGATCACAGATTTTGGGCTGGCCAAAC-3′ (SEQ ID NO: 914)

[chemical structure]

EGFR-2828 Target: 5′-GATCACAGATTTTGGGCTGGCCAAACT-3′ (SEQ ID NO: 915)

[chemical structure]

EGFR-2829 Target: 5′-ATCACAGATTTTGGGCTGGCCAAACTG-3′ (SEQ ID NO: 916)

[chemical structure]

EGFR-2830 Target: 5′-TCACAGATTTTGGGCTGGCCAAACTGC-3′ (SEQ ID NO: 917)

[chemical structure]

EGFR-2831 Target: 5′-CACAGATTTTGGGCTGGCCAAACTGCT-3′ (SEQ ID NO: 918)

[chemical structure]

EGFR-2832 Target: 5′-ACAGATTTTGGGCTGGCCAAACTGCTG-3′ (SEQ ID NO: 919)

[chemical structure]

EGFR-2833 Target: 5′-CAGATTTTGGGCTGGCCAAACTGCTGG-3′ (SEQ ID NO: 920)

[chemical structure]

EGFR-2834 Target: 5′-AGATTTTGGGCTGGCCAAACTGCTGGG-3′ (SEQ ID NO: 921)

[chemical structure]

EGFR-2835 Target: 5′-GATTTTGGGCTGGCCAAACTGCTGGGT-3′ (SEQ ID NO: 922)

[chemical structure]

EGFR-2836 Target: 5′-ATTTTGGGCTGGCCAAACTGCTGGGTG-3′ (SEQ ID NO: 923)

[chemical structure]

EGFR-2837 Target: 5′-TTTTGGGCTGGCCAAACTGCTGGGTGC-3′ (SEQ ID NO: 924)

[chemical structure]

EGFR-2891 Target: 5′-AGGCAAAGTGCCTATCAAGTGGATGGC-3′ (SEQ ID NO: 925)

[chemical structure]

EGFR-2892 Target: 5′-GGCAAAGTGCCTATCAAGTGGATGGCA-3′ (SEQ ID NO: 926)

[chemical structure]

EGFR-2893 Target: 5′-GCAAAGTGCCTATCAAGTGGATGGCAT-3′ (SEQ ID NO: 927)

[chemical structure]

EGFR-2894 Target: 5′-CAAAGTGCCTATCAAGTGGATGGCATT-3′ (SEQ ID NO: 928)

[chemical structure]

EGFR-2895 Target: 5′-AAAGTGCCTATCAAGTGGATGGCATTG-3′ (SEQ ID NO: 929)

[chemical structure]

EGFR-2896 Target: 5′-AAGTGCCTATCAAGTGGATGGCATTGG-3′ (SEQ ID NO: 930)

[chemical structure]

EGFR-2897 Target: 5′-AGTGCCTATCAAGTGGATGGCATTGGA-3′ (SEQ ID NO: 931)

[chemical structure]

EGFR-3088 Target: 5′-GTACCATCGATGTCTACATGATCATGG-3′ (SEQ ID NO: 932)

[chemical structure]

EGFR-3089 Target: 5′-TACCATCGATGTCTACATGATCATGGT-3′ (SEQ ID NO: 933)

[chemical structure]

EGFR-3090 Target: 5′-ACCATCGATGTCTACATGATCATGGTC-3′ (SEQ ID NO: 934)

[chemical structure]

EGFR-3091 Target: 5′-CCATCGATGTCTACATGATCATGGTCA-3′ (SEQ ID NO: 935)

[chemical structure]

EGFR-3092 Target: 5′-CATCGATGTCTACATGATCATGGTCAA-3′ (SEQ ID NO: 936)

[chemical structure]

EGFR-3093 Target: 5′-ATCGATGTCTACATGATCATGGTCAAG-3′ (SEQ ID NO: 937)

[chemical structure]

EGFR-3094 Target: 5′-TCGATGTCTACATGATCATGGTCAAGT-3′ (SEQ ID NO: 938)

[chemical structure]

EGFR-3095 Target: 5′-CGATGTCTACATGATCATGGTCAAGTG-3′ (SEQ ID NO: 939)

[chemical structure]

EGFR-3096 Target: 5′-GATGTCTACATGATCATGGTCAAGTGC-3′ (SEQ ID NO: 940)

[chemical structure]

EGFR-3097 Target: 5′-ATGTCTACATGATCATGGTCAAGTGCT-3′ (SEQ ID NO: 941)

[chemical structure]

EGFR-3098 Target: 5′-TGTCTACATGATCATGGTCAAGTGCTG-3′ (SEQ ID NO: 942)

[chemical structure]

EGFR-3099 Target: 5′-GTCTACATGATCATGGTCAAGTGCTGG-3′ (SEQ ID NO: 943)

[chemical structure]

EGFR-3100 Target: 5′-TCTACATGATCATGGTCAAGTGCTGGA-3′ (SEQ ID NO: 944)

[chemical structure]

EGFR-3101 Target: 5′-CTACATGATCATGGTCAAGTGCTGGAT-3′ (SEQ ID NO: 945)

[chemical structure]

EGFR-3102 Target: 5′-TACATGATCATGGTCAAGTGCTGGATG-3′ (SEQ ID NO: 946)

[chemical structure]

EGFR-3103 Target: 5′-ACATGATCATGGTCAAGTGCTGGATGA-3′ (SEQ ID NO: 947)

[chemical structure]

EGFR-3104 Target: 5′-CATGATCATGGTCAAGTGCTGGATGAT-3′ (SEQ ID NO: 948)

[chemical structure]

EGFR-3105 Target: 5′-ATGATCATGGTCAAGTGCTGGATGATA-3′ (SEQ ID NO: 949)

[chemical structure]

EGFR-3106 Target: 5′-TGATCATGGTCAAGTGCTGGATGATAG-3′ (SEQ ID NO: 950)

[chemical structure]

EGFR-3107 Target: 5′-GATCATGGTCAAGTGCTGGATGATAGA-3′ (SEQ ID NO: 951)

[chemical structure]

EGFR-3108 Target: 5′-ATCATGGTCAAGTGCTGGATGATAGAC-3′ (SEQ ID NO: 952)

[chemical structure]

EGFR-3109 Target: 5′-TCATGGTCAAGTGCTGGATGATAGACG-3′ (SEQ ID NO: 953)

[chemical structure]

EGFR-3110 Target: 5′-CATGGTCAAGTGCTGGATGATAGACGC-3′ (SEQ ID NO: 954)

[chemical structure]

EGFR-3111 Target: 5′-ATGGTCAAGTGCTGGATGATAGACGCA-3′ (SEQ ID NO: 955)

[chemical structure]

EGFR-3112 Target: 5′-TGGTCAAGTGCTGGATGATAGACGCAG-3′ (SEQ ID NO: 956)

[chemical structure]

EGFR-3113 Target: 5′-GGTCAAGTGCTGGATGATAGACGCAGA-3′ (SEQ ID NO: 957)

[chemical structure]

EGFR-3169 Target: 5′-TCGAATTCTCCAAAATGGCCCGAGACC-3′ (SEQ ID NO: 958)

[chemical structure]

EGFR-3170 Target: 5′-CGAATTCTCCAAAATGGCCCGAGACCC-3′ (SEQ ID NO: 959)

[chemical structure]

EGFR-3220 Target: 5′-GGGATGAAAGAATGCATTTGCCAAGTC-3′ (SEQ ID NO: 960)

[chemical structure]

EGFR-3221 Target: 5′-GGATGAAAGAATGCATTTGCCAAGTCC-3′ (SEQ ID NO: 961)

[chemical structure]

EGFR-3222 Target: 5′-GATGAAAGAATGCATTTGCCAAGTCCT-3′ (SEQ ID NO: 962)

[chemical structure]

EGFR-3223 Target: 5′-ATGAAAGAATGCATTTGCCAAGTCCTA-3′ (SEQ ID NO: 963)

[chemical structure]

EGFR-3224 Target: 5′-TGAAAGAATGCATTTGCCAAGTCCTAC-3′ (SEQ ID NO: 964)

[chemical structure]

EGFR-3772 Target: 5′-TGGACAACCCTGACTACCAGCAGGACT-3′ (SEQ ID NO: 965)

[chemical structure]

EGFR-3773 Target: 5′-GGACAACCCTGACTACCAGCAGGACTT-3′ (SEQ ID NO: 966)

[chemical structure]

EGFR-3774 Target: 5′-GACAACCCTGACTACCAGCAGGACTTC-3′ (SEQ ID NO: 967)

[chemical structure]

EGFR-3775 Target: 5′-ACAACCCTGACTACCAGCAGGACTTCT-3′ (SEQ ID NO: 968)

[chemical structure]

EGFR-3776 Target: 5′-CAACCCTGACTACCAGCAGGACTTCTT-3′ (SEQ ID NO: 969)

[chemical structure]

EGFR-3777 Target: 5′-AACCCTGACTACCAGCAGGACTTCTTT-3′ (SEQ ID NO: 970)

[chemical structure]

EGFR-3778 Target: 5′-ACCCTGACTACCAGCAGGACTTCTTTC-3′ (SEQ ID NO: 971)

[chemical structure]

EGFR-3779 Target: 5′-CCCTGACTACCAGCAGGACTTCTTTCC-3′ (SEQ ID NO: 972)

TABLE 8
Selected Mouse Anti-EGFR “Blunt/Fray” DsiRNAs

[chemical structure]

EGFR-m71 Target: 5′-CAGCGCAACGCGCAGCAGCCTCCCTCC-3′ (SEQ ID NO: 973)

[chemical structure]

EGFR-m78 Target: 5′-ACGCGCAGCAGCCTCCCTCCTCTTCTT-3′ (SEQ ID NO: 974)

[chemical structure]

EGFR-m87 Target: 5′-AGCCTCCCTCCTCTTCTTCCCGCACTG-3′ (SEQ ID NO: 975)

[chemical structure]

EGFR-m90 Target: 5′-CTCCCTCCTCTTCTTCCCGCACTGTGC-3′ (SEQ ID NO: 976)

[chemical structure]

EGFR-m92 Target: 5′-CCCTCCTCTTCTTCCCGCACTGTGCGC-3′ (SEQ ID NO: 977)

[chemical structure]

EGFR-m94 Target: 5′-CTCCTCTTCTTCCCGCACTGTGCGCTC-3′ (SEQ ID NO: 978)

[chemical structure]

EGFR-m97 Target: 5′-CTCTTCTTCCCGCACTGTGCGCTCCTC-3′ (SEQ ID NO: 979)

[chemical structure]

EGFR-m99 Target: 5′-CTTCTTCCCGCACTGTGCGCTCCTCCT-3′ (SEQ ID NO: 980)

[chemical structure]

EGFR-m100 Target: 5′-TTCTTCCCGCACTGTGCGCTCCTCCTG-3′ (SEQ ID NO: 981)

[chemical structure]

EGFR-m101 Target: 5′-TCTTCCCGCACTGTGCGCTCCTCCTGG-3′ (SEQ ID NO: 982)

[chemical structure]

EGFR-m111 Target: 5′-CTGTGCGCTCCTCCTGGGCTAGGGCGT-3′ (SEQ ID NO: 983)

[chemical structure]

EGFR-m114 Target: 5′-TGCGCTCCTCCTGGGCTAGGGCGTCTG-3′ (SEQ ID NO: 984)

[chemical structure]

EGFR-m333 Target: 5′-CACACTGCTGGTGTTGCTGACCGCGCT-3′ (SEQ ID NO: 985)

[chemical structure]

EGFR-m334 Target: 5′-ACACTGCTGGTGTTGCTGACCGCGCTC-3′ (SEQ ID NO: 986)

[chemical structure]

EGFR-m335 Target: 5′-CACTGCTGGTGTTGCTGACCGCGCTCT-3′ (SEQ ID NO: 987)

[chemical structure]

EGFR-m336 Target: 5′-ACTGCTGGTGTTGCTGACCGCGCTCTG-3′ (SEQ ID NO: 988)

[chemical structure]

EGFR-m337 Target: 5′-CTGCTGGTGTTGCTGACCGCGCTCTGC-3′ (SEQ ID NO: 989)

[chemical structure]

EGFR-m338 Target: 5′-TGCTGGTGTTGCTGACCGCGCTCTGCG-3′ (SEQ ID NO: 990)

[chemical structure]

EGFR-m339 Target: 5′-GCTGGTGTTGCTGACCGCGCTCTGCGC-3′ (SEQ ID NO: 991)

[chemical structure]

EGFR-m341 Target: 5′-TGGTGTTGCTGACCGCGCTCTGCGCCG-3′ (SEQ ID NO: 992)

[chemical structure]

EGFR-m342 Target: 5′-GGTGTTGCTGACCGCGCTCTGCGCCGC-3′ (SEQ ID NO: 993)

[chemical structure]

EGFR-m343 Target: 5′-GTGTTGCTGACCGCGCTCTGCGCCGCA-3′ (SEQ ID NO: 994)

[chemical structure]

EGFR-m344 Target: 5′-TGTTGCTGACCGCGCTCTGCGCCGCAG-3′ (SEQ ID NO: 995)

[chemical structure]

EGFR-m347 Target: 5′-TGCTGACCGCGCTCTGCGCCGCAGGTG-3′ (SEQ ID NO: 996)

[chemical structure]

EGFR-m348 Target: 5′-GCTGACCGCGCTCTGCGCCGCAGGTGG-3′ (SEQ ID NO: 997)

[chemical structure]

EGFR-m734 Target: 5′-TCCTGATTGGTGCTGTGCGATTCAGCA-3′ (SEQ ID NO: 998)

[chemical structure]

EGFR-m735 Target: 5′-CCTGATTGGTGCTGTGCGATTCAGCAA-3′ (SEQ ID NO: 999)

[chemical structure]

EGFR-m736 Target: 5′-CTGATTGGTGCTGTGCGATTCAGCAAC-3′ (SEQ ID NO: 1000)

[chemical structure]

EGFR-m738 Target: 5′-GATTGGTGCTGTGCGATTCAGCAACAA-3′ (SEQ ID NO: 1001)

[chemical structure]

EGFR-m740 Target: 5′-TTGGTGCTGTGCGATTCAGCAACAACC-3′ (SEQ ID NO: 1002)

[chemical structure]

EGFR-m741 Target: 5′-TGGTGCTGTGCGATTCAGCAACAACCC-3′ (SEQ ID NO: 1003)

[chemical structure]

EGFR-m879 Target: 5′-TCCAAGCTGTCCCAATGGAAGCTGCTG-3′ (SEQ ID NO: 1004)

[chemical structure]

EGFR-m948 Target: 5′-CTGTGCCCAGCAATGTTCCCATCGCTG-3′ (SEQ ID NO: 1005)

[chemical structure]

EGFR-m1154 Target: 5′-GGAAGTACAGCTTTGGTGCCACCTGTG-3′ (SEQ ID NO: 1006)

[chemical structure]

EGFR-m1302 Target: 5′-CTGTCGCAAAGTTTGTAATGGCATAGG-3′ (SEQ ID NO: 1007)

[chemical structure]

EGFR-m1439 Target: 5′-GGGATTCTTTCACGCGCACTCCTCCTC-3′ (SEQ ID NO: 1008)

[chemical structure]

EGFR-m1509 Target: 5′-AACAGGCTTTTTGCTGATTCAGGCTTG-3′ (SEQ ID NO: 1009)

[chemical structure]

EGFR-m1526 Target: 5′-TTCAGGCTTGGCCTGATAACTGGACTG-3′ (SEQ ID NO: 1010)

[chemical structure]

EGFR-m1528 Target: 5′-CAGGCTTGGCCTGATAACTGGACTGAC-3′ (SEQ ID NO: 1011)

[chemical structure]

EGFR-m1531 Target: 5′-GCTTGGCCTGATAACTGGACTGACCTC-3′ (SEQ ID NO: 1012)

[chemical structure]

EGFR-m2168 Target: 5′-ACGCCAACTGTACCTATGGATGTGCTG-3′ (SEQ ID NO: 1013)

[chemical structure]

EGFR-m2253 Target: 5′-CACTGGGATTGTGGGTGGCCTCCTCTT-3′ (SEQ ID NO: 1014)

[chemical structure]

EGFR-m2286 Target: 5′-GGTGGTGGCCCTTGGGATTGGCCTATT-3′ (SEQ ID NO: 1015)

[chemical structure]

EGFR-m2301 Target: 5′-GATTGGCCTATTCATGCGAAGACGTCA-3′ (SEQ ID NO: 1016)

[chemical structure]

EGFR-m2350 Target: 5′-CGCCGCCTGCTTCAAGAGAGAGAGCTC-3′ (SEQ ID NO: 1017)

[chemical structure]

EGFR-m2351 Target: 5′-GCCGCCTGCTTCAAGAGAGAGAGCTCG-3′ (SEQ ID NO: 1018)

[chemical structure]

EGFR-m2352 Target: 5′-CCGCCTGCTTCAAGAGAGAGAGCTCGT-3′ (SEQ ID NO: 1019)

[chemical structure]

EGFR-m2617 Target: 5′-GTGGACAACCCTCATGTATGCCGCCTC-3′ (SEQ ID NO: 1020)

[chemical structure]

EGFR-m2631 Target: 5′-TGTATGCCGCCTCCTGGGCATCTGTCT-3′ (SEQ ID NO: 1021)

[chemical structure]

EGFR-m2683 Target: 5′-CAGCTCATGCCCTACGGTTGCCTCCTG-3′ (SEQ ID NO: 1022)

[chemical structure]

EGFR-m2684 Target: 5′-AGCTCATGCCCTACGGTTGCCTCCTGG-3′ (SEQ ID NO: 1023)

[chemical structure]

EGFR-m2800 Target: 5′-GATCGGCGTTTGGTGCACCGTGACTTG-3′ (SEQ ID NO: 1024)

[chemical structure]

EGFR-m2805 Target: 5′-GCGTTTGGTGCACCGTGACTTGGCAGC-3′ (SEQ ID NO: 1025)

[chemical structure]

EGFR-m2879 Target: 5′-TTGGGCTGGCCAAACTGCTTGGTGCTG-3′ (SEQ ID NO: 1026)

[chemical structure]

EGFR-m2880 Target: 5′-TGGGCTGGCCAAACTGCTTGGTGCTGA-3′ (SEQ ID NO: 1027)

[chemical structure]

EGFR-m2882 Target: 5′-GGCTGGCCAAACTGCTTGGTGCTGAAG-3′ (SEQ ID NO: 1028)

[chemical structure]

EGFR-m2883 Target: 5′-GCTGGCCAAACTGCTTGGTGCTGAAGA-3′ (SEQ ID NO: 1029)

[chemical structure]

EGFR-m3154 Target: 5′-GTCAAGTGCTGGATGATAGATGCTGAT-3′ (SEQ ID NO: 1030)

[chemical structure]

EGFR-m3155 Target: 5′-TCAAGTGCTGGATGATAGATGCTGATA-3′ (SEQ ID NO: 1031)

[chemical structure]

EGFR-m3156 Target: 5′-CAAGTGCTGGATGATAGATGCTGATAG-3′ (SEQ ID NO: 1032)

[chemical structure]

EGFR-m3157 Target: 5′-AAGTGCTGGATGATAGATGCTGATAGC-3′ (SEQ ID NO: 1033)

[chemical structure]

EGFR-m3158 Target: 5′-AGTGCTGGATGATAGATGCTGATAGCC-3′ (SEQ ID NO: 1034)

[chemical structure]

EGFR-m3159 Target: 5′-GTGCTGGATGATAGATGCTGATAGCCG-3′ (SEQ ID NO: 1035)

[chemical structure]

EGFR-m3160 Target: 5′-TGCTGGATGATAGATGCTGATAGCCGC-3′ (SEQ ID NO: 1036)

[chemical structure]

EGFR-m3161 Target: 5′-GCTGGATGATAGATGCTGATAGCCGCC-3′ (SEQ ID NO: 1037)

[chemical structure]

EGFR-m3162 Target: 5′-CTGGATGATAGATGCTGATAGCCGCCC-3′ (SEQ ID NO: 1038)

[chemical structure]

EGFR-m3163 Target: 5′-TGGATGATAGATGCTGATAGCCGCCCA-3′ (SEQ ID NO: 1039)

[chemical structure]

EGFR-m3166 Target: 5′-ATGATAGATGCTGATAGCCGCCCAAAG-3′ (SEQ ID NO: 1040)

[chemical structure]

EGFR-m3168 Target: 5′-GATAGATGCTGATAGCCGCCCAAAGTT-3′ (SEQ ID NO: 1041)

[chemical structure]

EGFR-m3474 Target: 5′-GAGCTGCCGTGTCAAAGAAGACGCCTT-3′ (SEQ ID NO: 1042)

[chemical structure]

EGFR-m3475 Target: 5′-AGCTGCCGTGTCAAAGAAGACGCCTTC-3′ (SEQ ID NO: 1043)

[chemical structure]

EGFR-m3491 Target: 5′-AAGACGCCTTCTTGCAGCGGTACAGCT-3′ (SEQ ID NO: 1044)

[chemical structure]

EGFR-m3492 Target: 5′-AGACGCCTTCTTGCAGCGGTACAGCTC-3′ (SEQ ID NO: 1045)

[chemical structure]

EGFR-m3493 Target: 5′-GACGCCTTCTTGCAGCGGTACAGCTCC-3′ (SEQ ID NO: 1046)

[chemical structure]

EGFR-m3494 Target: 5′-ACGCCTTCTTGCAGCGGTACAGCTCCG-3′ (SEQ ID NO: 1047)

[chemical structure]

EGFR-m3495 Target: 5′-CGCCTTCTTGCAGCGGTACAGCTCCGA-3′ (SEQ ID NO: 1048)

[chemical structure]

EGFR-m3496 Target: 5′-GCCTTCTTGCAGCGGTACAGCTCCGAC-3′ (SEQ ID NO: 1049)

[chemical structure]

EGFR-m3497 Target: 5′-CCTTCTTGCAGCGGTACAGCTCCGACC-3′ (SEQ ID NO: 1050)

[chemical structure]

EGFR-m4056 Target: 5′-GACTGGCTTTAAAGCATAACTCTGATG-3′ (SEQ ID NO: 1051)

[chemical structure]

EGFR-m4103 Target: 5′-AAGTGGGCCTCTCTCCTGATGCACTTT-3′ (SEQ ID NO: 1052)

[chemical structure]

EGFR-m4104 Target: 5′-AGTGGGCCTCTCTCCTGATGCACTTTG-3′ (SEQ ID NO: 1053)

[chemical structure]

EGFR-m4105 Target: 5′-GTGGGCCTCTCTCCTGATGCACTTTGG-3′ (SEQ ID NO: 1054)

[chemical structure]

EGFR-m4106 Target: 5′-TGGGCCTCTCTCCTGATGCACTTTGGG-3′ (SEQ ID NO: 1055)

[chemical structure]

EGFR-m4109 Target: 5′-GCCTCTCTCCTGATGCACTTTGGGAAG-3′ (SEQ ID NO: 1056)

[chemical structure]

EGFR-m4309 Target: 5′-GATTGATGCACTCTTGTAGTCTGGTAC-3′ (SEQ ID NO: 1057)

[chemical structure]

EGFR-m4619 Target: 5′-TAGACTTCCTTCTATGTTTTCTGTTTC-3′ (SEQ ID NO: 1058)

[chemical structure]

EGFR-m4627 Target: 5′-CTTCTATGTTTTCTGTTTCATTGTTTT-3′ (SEQ ID NO: 1059)

[chemical structure]

EGFR-m5006 Target: 5′-TATGTTTTTCTTCCTGGTAAACTGCAG-3′ (SEQ ID NO: 1060)

[chemical structure]

EGFR-m5007 Target: 5′-ATGTTTTTCTTCCTGGTAAACTGCAGC-3′ (SEQ ID NO: 1061)

[chemical structure]

EGFR-m5008 Target: 5′-TGTTTTTCTTCCTGGTAAACTGCAGCC-3′ (SEQ ID NO: 1062)

[chemical structure]

EGFR-m5012 Target: 5′-TTTCTTCCTGGTAAACTGCAGCCAAAC-3′ (SEQ ID NO: 1063)

[chemical structure]

EGFR-m5329 Target: 5′-TTCGATCTTCCTAATGCTGTGACCCTT-3′ (SEQ ID NO: 1064)

[chemical structure]

EGFR-m5330 Target: 5′-TCGATCTTCCTAATGCTGTGACCCTTT-3′ (SEQ ID NO: 1065)

[chemical structure]

EGFR-m5403 Target: 5′-TTGTTGCTACTTCATAACTGTAAATTT-3′ (SEQ ID NO: 1066)

[chemical structure]

EGFR-m5638 Target: 5′-GCTTGCAGCATCCTCTGGTTTCCTAAC-3′ (SEQ ID NO: 1067)

[chemical structure]

EGFR-m5895 Target: 5′-CGTTGCAAGCCACTCTAACTGTAGCAA-3′ (SEQ ID NO: 1068)

TABLE 9
Selected Human Anti-EGFR “Blunt/Blunt” DsiRNAs

| | | |
|---|---|---|
| | 5′-GGCGCAGCGCGGCCGCAGCAGCCUCCG-3′ | (SEQ ID NO: 2137) |
| | 3′-CCGCGUCGCGCCGGCGUCGUCGGAGGC-5′ | (SEQ ID NO: 357) |
| EGFR-31 Target: | 5′-GGCGCAGCGCGGCCGCAGCAGCCTCCG-3′ | (SEQ ID NO: 713) |
| | 5′-GCGCAGCGCGGCCGCAGCAGCCUCCGC-3′ | (SEQ ID NO: 2138) |
| | 3′-CGCGUCGCGCCGGCGUCGUCGGAGGCG-5′ | (SEQ ID NO: 358) |
| EGFR-32 Target: | 5′-GCGCAGCGCGGCCGCAGCAGCCTCCGC-3′ | (SEQ ID NO: 714) |
| | 5′-GCAGCGCGGCCGCAGCAGCCUCCGCCC-3′ | (SEQ ID NO: 2139) |
| | 3′-CGUCGCGCCGGCGUCGUCGGAGGCGGG-5′ | (SEQ ID NO: 359) |
| EGFR-34 Target: | 5′-GCAGCGCGGCCGCAGCAGCCTCCGCCC-3′ | (SEQ ID NO: 715) |
| | 5′-CAGCGCUCCUGGCGCUGCUGGCUGCGC-3′ | (SEQ ID NO: 2140) |
| | 3′-GUCGCGAGGACCGCGACGACCGACGCG-5′ | (SEQ ID NO: 360) |
| EGFR-298 Target: | 5′-CAGCGCTCCTGGCGCTGCTGGCTGCGC-3′ | (SEQ ID NO: 716) |
| | 5′-GCGCUCCUGGCGCUGCUGGCUGCGCUC-3′ | (SEQ ID NO: 2141) |
| | 3′-CGCGAGGACCGCGACGACCGACGCGAG-5′ | (SEQ ID NO: 361) |
| EGFR-300 Target: | 5′-GCGCTCCTGGCGCTGCTGGCTGCGCTC-3′ | (SEQ ID NO: 717) |
| | 5′-GCUCCUGGCGCUGCUGGCUGCGCUCUG-3′ | (SEQ ID NO: 2142) |
| | 3′-CGAGGACCGCGACGACCGACGCGAGAC-5′ | (SEQ ID NO: 362) |
| EGFR-302 Target: | 5′-GCTCCTGGCGCTGCTGGCTGCGCTCTG-3′ | (SEQ ID NO: 718) |
| | 5′-CAGUUGGGCACUUUUGAAGAUCAUUUU-3′ | (SEQ ID NO: 2143) |
| | 3′-GUCAACCCGUGAAAACUUCUAGUAAAA-5′ | (SEQ ID NO: 363) |
| EGFR-390 Target: | 5′-CAGTTGGGCACTTTTGAAGATCATTTT-3′ | (SEQ ID NO: 719) |
| | 5′-UGGGAAUUUGGAAAUUACCUAUGUGCA-3′ | (SEQ ID NO: 2144) |
| | 3′-ACCCUUAAACCUUUAAUGGAUACACGU-5′ | (SEQ ID NO: 364) |
| EGFR-458 Target: | 5′-TGGGAATTTGGAAATTACCTATGTGCA-3′ | (SEQ ID NO: 720) |
| | 5′-AAUUAUGAUCUUUCCUUCUUAAAGACC-3′ | (SEQ ID NO: 2145) |
| | 3′-UUAAUACUAGAAAGGAAGAAUUUCUGG-5′ | (SEQ ID NO: 365) |
| EGFR-489 Target: | 5′-AATTATGATCTTTCCTTCTTAAAGACC-3′ | (SEQ ID NO: 721) |
| | 5′-GUGGCUGGUUAUGUCCUCAUUGCCCUC-3′ | (SEQ ID NO: 2146) |
| | 3′-CACCGACCAAUACAGGAGUAACGGGAG-5′ | (SEQ ID NO: 366) |
| EGFR-525 Target: | 5′-GTGGCTGGTTATGTCCTCATTGCCCTC-3′ | (SEQ ID NO: 722) |
| | 5′-UGCCCAUGAGAAAUUUACAGGAAAUCC-3′ | (SEQ ID NO: 2147) |
| | 3′-ACGGGUACUCUUUAAAUGUCCUUUAGG-5′ | (SEQ ID NO: 367) |
| EGFR-676 Target: | 5′-TGCCCATGAGAAATTTACAGGAAATCC-3′ | (SEQ ID NO: 723) |
| | 5′-CCUGCAUGGCGCCGUGCGGUUCAGCAA-3′ | (SEQ ID NO: 2148) |
| | 3′-GGACGUACCGCGGCACGCCAAGUCGUU-5′ | (SEQ ID NO: 368) |
| EGFR-701 Target: | 5′-CCTGCATGGCGCCGTGCGGTTCAGCAA-3′ | (SEQ ID NO: 724) |
| | 5′-UGGCGCCGUGCGGUUCAGCAACAACCC-3′ | (SEQ ID NO: 2149) |
| | 3′-ACCGCGGCACGCCAAGUCGUUGUUGGG-5′ | (SEQ ID NO: 369) |
| EGFR-707 Target: | 5′-TGGCGCCGTGCGGTTCAGCAACAACCC-3′ | (SEQ ID NO: 725) |
| | 5′-UGGCGCCGUGCGGUUCAGCAACAACCC-3′ | (SEQ ID NO: 2150) |
| | 3′-ACCGCGGCACGCCAAGUCGUUGUUGGG-5′ | (SEQ ID NO: 370) |
| EGFR-707 Target: | 5′-TGGCGCCGTGCGGTTCAGCAACAACCC-3′ | (SEQ ID NO: 726) |
| | 5′-GCGCCGUGCGGUUCAGCAACAACCCUG-3′ | (SEQ ID NO: 2151) |
| | 3′-CGCGGCACGCCAAGUCGUUGUUGGGAC-5′ | (SEQ ID NO: 371) |
| EGFR-709 Target: | 5′-GCGCCGTGCGGTTCAGCAACAACCCTG-3′ | (SEQ ID NO: 727) |
| | 5′-CGCCGUGCGGUUCAGCAACAACCCUGC-3′ | (SEQ ID NO: 2152) |
| | 3′-GCGGCACGCCAAGUCGUUGUUGGGACG-5′ | (SEQ ID NO: 372) |
| EGFR-710 Target: | 5′-CGCCGTGCGGTTCAGCAACAACCCTGC-3′ | (SEQ ID NO: 728) |
| | 5′-CAGCUGCCAAAAGUGUGAUCCAAGCUG-3′ | (SEQ ID NO: 2153) |
| | 3′-GUCGACGGUUUUCACACUAGGUUCGAC-5′ | (SEQ ID NO: 373) |
| EGFR-827 Target: | 5′-CAGCTGCCAAAAGTGTGATCCAAGCTG-3′ | (SEQ ID NO: 729) |
| | 5′-AUCUGUGCCCAGCAGUGCUCCGGGCGC-3′ | (SEQ ID NO: 2154) |
| | 3′-UAGACACGGGUCGUCACGAGGCCCGCG-5′ | (SEQ ID NO: 374) |
| EGFR-912 Target: | 5′-ATCTGTGCCCAGCAGTGCTCCGGGCGC-3′ | (SEQ ID NO: 730) |
| | 5′-CUGUGCCCAGCAGUGCUCCGGGCGCUG-3′ | (SEQ ID NO: 2155) |
| | 3′-GACACGGGUCGUCACGAGGCCCGCGAC-5′ | (SEQ ID NO: 375) |
| EGFR-914 Target: | 5′-CTGTGCCCAGCAGTGCTCCGGGCGCTG-3′ | (SEQ ID NO: 731) |
| | 5′-GUGCUCCGGGCGCUGCCGUGGCAAGUC-3′ | (SEQ ID NO: 2156) |
| | 3′-CACGAGGCCCGCGACGGCACCGUUCAG-5′ | (SEQ ID NO: 376) |
| EGFR-926 Target: | 5′-GTGCTCCGGGCGCTGCCGTGGCAAGTC-3′ | (SEQ ID NO: 732) |
| | 5′-GAGAGCGACUGCCUGGUCUGCCGCAAA-3′ | (SEQ ID NO: 2157) |
| | 3′-CUCUCGCUGACGGACCAGACGGCGUUU-5′ | (SEQ ID NO: 377) |
| EGFR-1005 Target: | 5′-GAGAGCGACTGCCTGGTCTGCCGCAAA-3′ | (SEQ ID NO: 733) |
| | 5′-CUGCCUGGUCUGCCGCAAAUUCCGAGA-3′ | (SEQ ID NO: 2158) |
| | 3′-GACGGACCAGACGGCGUUUAAGGCUCU-5′ | (SEQ ID NO: 378) |
| EGFR-1013 Target: | 5′-CTGCCTGGTCTGCCGCAAATTCCGAGA-3′ | (SEQ ID NO: 734) |
| | 5′-GACAGAUCACGGCUCGUGCGUCCGAGC-3′ | (SEQ ID NO: 2159) |
| | 3′-CUGUCUAGUGCCGAGCACGCAGGCUCG-5′ | (SEQ ID NO: 379) |
| EGFR-1175 Target: | 5′-GACAGATCACGGCTCGTGCGTCCGAGC-3′ | (SEQ ID NO: 735) |
| | 5′-CCGCAAAGUGUGUAACGGAAUAGGUAU-3′ | (SEQ ID NO: 2160) |
| | 3′-GGCGUUUCACACAUUGCCUUAUCCAUA-5′ | (SEQ ID NO: 380) |
| EGFR-1271 Target: | 5′-CCGCAAAGTGTGTAACGGAATAGGTAT-3′ | (SEQ ID NO: 736) |
| | 5′-CGGAAUAGGUAUUGGUGAAUUUAAAGA-3′ | (SEQ ID NO: 2161) |
| | 3′-GCCUUAUCCAUAACCACUUAAAUUUCU-5′ | (SEQ ID NO: 381) |
| EGFR-1286 Target: | 5′-CGGAATAGGTATTGGTGAATTTAAAGA-3′ | (SEQ ID NO: 737) |
| | 5′-CUACGAAUAUUAAACACUUCAAAAACU-3′ | (SEQ ID NO: 2162) |
| | 3′-GAUGCUUAUAAUUUGUGAAGUUUUUGA-5′ | (SEQ ID NO: 382) |
| EGFR-1330 Target: | 5′-CTACGAATATTAAACACTTCAAAAACT-3′ | (SEQ ID NO: 738) |
| | 5′-CCACAGGAACUGGAUAUUCUGAAAACC-3′ | (SEQ ID NO: 2163) |
| | 3′-GGUGUCCUUGACCUAUAAGACUUUUGG-5′ | (SEQ ID NO: 383) |
| EGFR-1437 Target: | 5′-CCACAGGAACTGGATATTCTGAAAACC-3′ | (SEQ ID NO: 739) |
| | 5′-CACAGGGUUUUUGCUGAUUCAGGCUUG-3′ | (SEQ ID NO: 2164) |
| | 3′-GUGUCCCAAAAACGACUAAGUCCGAAC-5′ | (SEQ ID NO: 384) |
| EGFR-1475 Target: | 5′-CACAGGGTTTTTGCTGATTCAGGCTTG-3′ | (SEQ ID NO: 740) |
| | 5′-UUCAGGAAACAAAAAUUUGUGCUAUGC-3′ | (SEQ ID NO: 2165) |
| | 3′-AAGUCCUUUGUUUUUAAACACGAUACG-5′ | (SEQ ID NO: 385) |
| EGFR-1661 Target: | 5′-TTCAGGAAACAAAAATTTGTGCTATGC-3′ | (SEQ ID NO: 741) |
| | 5′-GUGCUAUGCAAAUACAAUAAACUGGAA-3′ | (SEQ ID NO: 2166) |
| | 3′-CACGAUACGUUUAUGUUAUUUGACCUU-5′ | (SEQ ID NO: 386) |
| EGFR-1679 Target: | 5′-GTGCTATGCAAATACAATAAACTGGAA-3′ | (SEQ ID NO: 742) |
| | 5′-CCGGUCAGAAAACCAAAAUUAUAAGCA-3′ | (SEQ ID NO: 2167) |
| | 3′-GGCCAGUCUUUUGGUUUUAAUAUUCGU-5′ | (SEQ ID NO: 387) |
| EGFR-1723 Target: | 5′-CCGGTCAGAAAACCAAAATTATAAGCA-3′ | (SEQ ID NO: 743) |
| | 5′-CUGCGUCUCUUGCCGGAAUGUCAGCCG-3′ | (SEQ ID NO: 2168) |
| | 3′-GACGCAGAGAACGGCCUUACAGUCGGC-5′ | (SEQ ID NO: 388) |
| EGFR-1838 Target: | 5′-CTGCGTCTCTTGCCGGAATGTCAGCCG-3′ | (SEQ ID NO: 744) |
| | 5′-GGGCCCUCCUCUUGCUGCUGGUGGUGG-3′ | (SEQ ID NO: 2169) |
| | 3′-CCCGGGAGGAGAACGACGACCACCACC-5′ | (SEQ ID NO: 389) |
| EGFR-2227 Target: | 5′-GGGCCCTCCTCTTGCTGCTGGTGGTGG-3′ | (SEQ ID NO: 745) |
| | 5′-GGCCCUCCUCUUGCUGCUGGUGGUGGC-3′ | (SEQ ID NO: 2170) |
| | 3′-CCGGGAGGAGAACGACGACCACCACCG-5′ | (SEQ ID NO: 390) |
| EGFR-2228 Target: | 5′-GGCCCTCCTCTTGCTGCTGGTGGTGGC-3′ | (SEQ ID NO: 746) |
| | 5′-CUCCUCUUGCUGCUGGUGGUGGCCCUG-3′ | (SEQ ID NO: 2171) |
| | 3′-GAGGAGAACGACGACCACCACCGGGAC-5′ | (SEQ ID NO: 391) |
| EGFR-2232 Target: | 5′-CTCCTCTTGCTGCTGGTGGTGGCCCTG-3′ | (SEQ ID NO: 747) |
| | 5′-UCCUCUUGCUGCUGGUGGUGGCCCUGG-3′ | (SEQ ID NO: 2172) |
| | 3′-AGGAGAACGACGACCACCACCGGGACC-5′ | (SEQ ID NO: 392) |
| EGFR-2233 Target: | 5′-TCCTCTTGCTGCTGGTGGTGGCCCTGG-3′ | (SEQ ID NO: 748) |
| | 5′-CGGAAGCGCACGCUGCGGAGGCUGCUG-3′ | (SEQ ID NO: 2173) |
| | 3′-GCCUUCGCGUGCGACGCCUCCGACGAC-5′ | (SEQ ID NO: 393) |
| EGFR-2295 Target: | 5′-CGGAAGCGCACGCTGCGGAGGCTGCTG-3′ | (SEQ ID NO: 749) |
| | 5′-AAGCGCACGCUGCGGAGGCUGCUGCAG-3′ | (SEQ ID NO: 2174) |
| | 3′-UUCGCGUGCGACGCCUCCGACGACGUC-5′ | (SEQ ID NO: 394) |
| EGFR-2298 Target: | 5′-AAGCGCACGCTGCGGAGGCTGCTGCAG-3′ | (SEQ ID NO: 750) |
| | 5′-AACUGAAUUCAAAAAGAUCAAAGUGCU-3′ | (SEQ ID NO: 2175) |
| | 3′-UUGACUUAAGUUUUUCUAGUUUCACGA-5′ | (SEQ ID NO: 395) |
| EGFR-2399 Target: | 5′-AACTGAATTCAAAAAGATCAAAGTGCT-3′ | (SEQ ID NO: 751) |
| | 5′-CAAAGUGCUGGGCUCCGGUGCGUUCGG-3′ | (SEQ ID NO: 2176) |
| | 3′-GUUUCACGACCCGAGGCCACGCAAGCC-5′ | (SEQ ID NO: 396) |
| EGFR-2417 Target: | 5′-CAAAGTGCTGGGCTCCGGTGCGTTCGG-3′ | (SEQ ID NO: 752) |
| | 5′-AAGUGCUGGGCUCCGGUGCGUUCGGCA-3′ | (SEQ ID NO: 2177) |
| | 3′-UUCACGACCCGAGGCCACGCAAGCCGU-5′ | (SEQ ID NO: 397) |
| EGFR-2419 Target: | 5′-AAGTGCTGGGCTCCGGTGCGTTCGGCA-3′ | (SEQ ID NO: 753) |
| | 5′-AGUGCUGGGCUCCGGUGCGUUCGGCAC-3′ | (SEQ ID NO: 2178) |
| | 3′-UCACGACCCGAGGCCACGCAAGCCGUG-5′ | (SEQ ID NO: 398) |
| EGFR-2420 Target: | 5′-AGTGCTGGGCTCCGGTGCGTTCGGCAC-3′ | (SEQ ID NO: 754) |
| | 5′-GUGCUGGGCUCCGGUGCGUUCGGCACG-3′ | (SEQ ID NO: 2179) |
| | 3′-CACGACCCGAGGCCACGCAAGCCGUGC-5′ | (SEQ ID NO: 399) |
| EGFR-2421 Target: | 5′-GTGCTGGGCTCCGGTGCGTTCGGCACG-3′ | (SEQ ID NO: 755) |
| | 5′-UGCUGGGCUCCGGUGCGUUCGGCACGG-3′ | (SEQ ID NO: 2180) |
| | 3′-ACGACCCGAGGCCACGCAAGCCGUGCC-5′ | (SEQ ID NO: 400) |
| EGFR-2422 Target: | 5′-TGCTGGGCTCCGGTGCGTTCGGCACGG-3′ | (SEQ ID NO: 756) |
| | 5′-CGUGUGCCGCCUGCUGGGCAUCUGCCU-3′ | (SEQ ID NO: 2181) |
| | 3′-GCACACGGCGGACGACCCGUAGACGGA-5′ | (SEQ ID NO: 401) |
| EGFR-2591 Target: | 5′-CGTGTGCCGCCTGCTGGGCATCTGCCT-3′ | (SEQ ID NO: 757) |
| | 5′-GUGUGCCGCCUGCUGGGCAUCUGCCUC-3′ | (SEQ ID NO: 2182) |
| | 3′-CACACGGCGGACGACCCGUAGACGGAG-5′ | (SEQ ID NO: 402) |
| EGFR-2592 Target: | 5′-GTGTGCCGCCTGCTGGGCATCTGCCTC-3′ | (SEQ ID NO: 758) |
| | 5′-GUGCCGCCUGCUGGGCAUCUGCCUCAC-3′ | (SEQ ID NO: 2183) |
| | 3′-CACGGCGGACGACCCGUAGACGGAGUG-5′ | (SEQ ID NO: 403) |
| EGFR-2594 Target: | 5′-GTGCCGCCTGCTGGGCATCTGCCTCAC-3′ | (SEQ ID NO: 759) |
| | 5′-CACCGUGCAGCUCAUCACGCAGCUCAU-3′ | (SEQ ID NO: 2184) |
| | 3′-GUGGCACGUCGAGUAGUGCGUCGAGUA-5′ | (SEQ ID NO: 404) |
| EGFR-2624 Target: | 5′-CACCGTGCAGCTCATCACGCAGCTCAT-3′ | (SEQ ID NO: 760) |
| | 5′-CGUGCAGCUCAUCACGCAGCUCAUGCC-3′ | (SEQ ID NO: 2185) |
| | 3′-GCACGUCGAGUAGUGCGUCGAGUACGG-5′ | (SEQ ID NO: 405) |
| EGFR-2627 Target: | 5′-CGTGCAGCTCATCACGCAGCTCATGCC-3′ | (SEQ ID NO: 761) |
| | 5′-CAGCUCAUCACGCAGCUCAUGCCCUUC-3′ | (SEQ ID NO: 2186) |
| | 3′-GUCGAGUAGUGCGUCGAGUACGGGAAG-5′ | (SEQ ID NO: 406) |
| EGFR-2631 Target: | 5′-CAGCTCATCACGCAGCTCATGCCCTTC-3′ | (SEQ ID NO: 762) |
| | 5′-AGCUCAUCACGCAGCUCAUGCCCUUCG-3′ | (SEQ ID NO: 2187) |
| | 3′-UCGAGUAGUGCGUCGAGUACGGGAAGC-5′ | (SEQ ID NO: 407) |
| EGFR-2632 Target: | 5′-AGCTCATCACGCAGCTCATGCCCTTCG-3′ | (SEQ ID NO: 763) |
| | 5′-CAGCUCAUGCCCUUCGGCUGCCUCCUG-3′ | (SEQ ID NO: 2188) |
| | 3′-GUCGAGUACGGGAAGCCGACGGAGGAC-5′ | (SEQ ID NO: 408) |
| EGFR-2643 Target: | 5′-CAGCTCATGCCCTTCGGCTGCCTCCTG-3′ | (SEQ ID NO: 764) |
| | 5′-AGCUCAUGCCCUUCGGCUGCCUCCUGG-3′ | (SEQ ID NO: 2189) |
| | 3′-UCGAGUACGGGAAGCCGACGGAGGACC-5′ | (SEQ ID NO: 409) |
| EGFR-2644 Target: | 5′-AGCTCATGCCCTTCGGCTGCCTCCTGG-3′ | (SEQ ID NO: 765) |
| | 5′-UUGGAGGACCGUCGCUUGGUGCACCGC-3′ | (SEQ ID NO: 2190) |
| | 3′-AACCUCCUGGCAGCGAACCACGUGGCG-5′ | (SEQ ID NO: 410) |
| EGFR-2754 Target: | 5′-TTGGAGGACCGTCGCTTGGTGCACCGC-3′ | (SEQ ID NO: 766) |
| | 5′-GGAGGACCGUCGCUUGGUGCACCGCGA-3′ | (SEQ ID NO: 2191) |
| | 3′-CCUCCUGGCAGCGAACCACGUGGCGCU-5′ | (SEQ ID NO: 411) |
| EGFR-2756 Target: | 5′-GGAGGACCGTCGCTTGGTGCACCGCGA-3′ | (SEQ ID NO: 767) |
| | 5′-GAGGACCGUCGCUUGGUGCACCGCGAC-3′ | (SEQ ID NO: 2192) |
| | 3′-CUCCUGGCAGCGAACCACGUGGCGCUG-5′ | (SEQ ID NO: 412) |
| GFR-2757 Target: | 5′-GAGGACCGTCGCTTGGTGCACCGCGAC-3′ | (SEQ ID NO: 768) |
| | 5′-AGGACCGUCGCUUGGUGCACCGCGACC-3′ | (SEQ ID NO: 2193) |
| | 3′-UCCUGGCAGCGAACCACGUGGCGCUGG-5′ | (SEQ ID NO: 413) |
| EGFR-2758 Target: | 5′-AGGACCGTCGCTTGGTGCACCGCGACC-3′ | (SEQ ID NO: 769) |
| | 5′-GACCGUCGCUUGGUGCACCGCGACCUG-3′ | (SEQ ID NO: 2194) |
| | 3′-CUGGCAGCGAACCACGUGGCGCUGGAC-5′ | (SEQ ID NO: 414) |
| EGFR-2760 Target: | 5′-GACCGTCGCTTGGTGCACCGCGACCTG-3′ | (SEQ ID NO: 770) |
| | 5′-CCGUCGCUUGGUGCACCGCGACCUGGC-3′ | (SEQ ID NO: 2195) |
| | 3′-GGCAGCGAACCACGUGGCGCUGGACCG-5′ | (SEQ ID NO: 415) |
| EGFR-2762 Target: | 5′-CCGTCGCTTGGTGCACCGCGACCTGGC-3′ | (SEQ ID NO: 771) |
| | 5′-GUCGCUUGGUGCACCGCGACCUGGCAG-3′ | (SEQ ID NO: 2196) |
| | 3′-CAGCGAACCACGUGGCGCUGGACCGUC-5′ | (SEQ ID NO: 416) |
| EGFR-2764 Target: | 5′-GTCGCTTGGTGCACCGCGACCTGGCAG-3′ | (SEQ ID NO: 772) |
| | 5′-UCGCUUGGUGCACCGCGACCUGGCAGC-3′ | (SEQ ID NO: 2197) |
| | 3′-AGCGAACCACGUGGCGCUGGACCGUCG-5′ | (SEQ ID NO: 417) |
| EGFR-2765 Target: | 5′-TCGCTTGGTGCACCGCGACCTGGCAGC-3′ | (SEQ ID NO: 773) |
| | 5′-GCUUGGUGCACCGCGACCUGGCAGCCA-3′ | (SEQ ID NO: 2198) |
| | 3′-CGAACCACGUGGCGCUGGACCGUCGGU-5′ | (SEQ ID NO: 418) |
| EGFR-2767 Target: | 5′-GCTTGGTGCACCGCGACCTGGCAGCCA-3′ | (SEQ ID NO: 774) |
| | 5′-GGCAUUGGAAUCAAUUUUACACAGAAU-3′ | (SEQ ID NO: 2199) |
| | 3′-CCGUAACCUUAGUUAAAAUGUGUCUUA-5′ | (SEQ ID NO: 419) |
| EGFR-2915 Target: | 5′-GGCATTGGAATCAATTTTACACAGAAT-3′ | (SEQ ID NO: 775) |
| | 5′-UCAAGUGCUGGAUGAUAGACGCAGAUA-3′ | (SEQ ID NO: 2200) |
| | 3′-AGUUCACGACCUACUAUCUGCGUCUAU-5′ | (SEQ ID NO: 420) |
| EGFR-3115 Target: | 5′-TCAAGTGCTGGATGATAGACGCAGATA-3′ | (SEQ ID NO: 776) |
| | 5′-AAGUGCUGGAUGAUAGACGCAGAUAGU-3′ | (SEQ ID NO: 2201) |
| | 3′-UUCACGACCUACUAUCUGCGUCUAUCA-5′ | (SEQ ID NO: 421) |
| EGFR-3117 Target: | 5′-AAGTGCTGGATGATAGACGCAGATAGT-3′ | (SEQ ID NO: 777) |
| | 5′-AGUGCUGGAUGAUAGACGCAGAUAGUC-3′ | (SEQ ID NO: 2202) |
| | 3′-UCACGACCUACUAUCUGCGUCUAUCAG-5′ | (SEQ ID NO: 422) |
| EGFR-3118 Target: | 5′-AGTGCTGGATGATAGACGCAGATAGTC-3′ | (SEQ ID NO: 778) |
| | 5′-UGCUGGAUGAUAGACGCAGAUAGUCGC-3′ | (SEQ ID NO: 2203) |
| | 3′-ACGACCUACUAUCUGCGUCUAUCAGCG-5′ | (SEQ ID NO: 423) |
| EGFR-3120 Target: | 5′-TGCTGGATGATAGACGCAGATAGTCGC-3′ | (SEQ ID NO: 779) |
| | 5′-CUCCUGAGCUCUCUGAGUGCAACCAGC-3′ | (SEQ ID NO: 2204) |
| | 3′-GAGGACUCGAGAGACUCACGUUGGUCG-5′ | (SEQ ID NO: 424) |
| EGFR-3372 Target: | 5′-CTCCTGAGCTCTCTGAGTGCAACCAGC-3′ | (SEQ ID NO: 780) |
| | 5′-CUGAGCUCUCUGAGUGCAACCAGCAAC-3′ | (SEQ ID NO: 2205) |
| | 3′-GACUCGAGAGACUCACGUUGGUCGUUG-5′ | (SEQ ID NO: 425) |
| EGFR-3375 Target: | 5′-CTGAGCTCTCTGAGTGCAACCAGCAAC-3′ | (SEQ ID NO: 781) |
| | 5′-AAGCUGUCCCAUCAAGGAAGACAGCUU-3′ | (SEQ ID NO: 2206) |
| | 3′-UUCGACAGGGUAGUUCCUUCUGUCGAA-5′ | (SEQ ID NO: 426) |
| EGFR-3440 Target: | 5′-AAGCTGTCCCATCAAGGAAGACAGCTT-3′ | (SEQ ID NO: 782) |
| | 5′-AGCUGUCCCAUCAAGGAAGACAGCUUC-3′ | (SEQ ID NO: 2207) |
| | 3′-UCGACAGGGUAGUUCCUUCUGUCGAAG-5′ | (SEQ ID NO: 427) |
| EGFR-3441 Target: | 5′-AGCTGTCCCATCAAGGAAGACAGCTTC-3′ | (SEQ ID NO: 783) |
| | 5′-AAGACAGCUUCUUGCAGCGAUACAGCU-3′ | (SEQ ID NO: 2208) |
| | 3′-UUCUGUCGAAGAACGUCGCUAUGUCGA-5′ | (SEQ ID NO: 428) |
| EGFR-3457 Target: | 5′-AAGACAGCTTCTTGCAGCGATACAGCT-3′ | (SEQ ID NO: 784) |
| | 5′-AGACAGCUUCUUGCAGCGAUACAGCUC-3′ | (SEQ ID NO: 2209) |
| | 3′-UCUGUCGAAGAACGUCGCUAUGUCGAG-5′ | (SEQ ID NO: 429) |
| EGFR-3458 Target: | 5′-AGACAGCTTCTTGCAGCGATACAGCTC-3′ | (SEQ ID NO: 785) |
| | 5′-GACAGCUUCUUGCAGCGAUACAGCUCA-3′ | (SEQ ID NO: 2210) |
| | 3′-CUGUCGAAGAACGUCGCUAUGUCGAGU-5′ | (SEQ ID NO: 430) |
| EGFR-3459 Target: | 5′-GACAGCTTCTTGCAGCGATACAGCTCA-3′ | (SEQ ID NO: 786) |
| | 5′-ACAGCUUCUUGCAGCGAUACAGCUCAG-3′ | (SEQ ID NO: 2211) |
| | 3′-UGUCGAAGAACGUCGCUAUGUCGAGUC-5′ | (SEQ ID NO: 431) |
| EGFR-3460 Target: | 5′-ACAGCTTCTTGCAGCGATACAGCTCAG-3′ | (SEQ ID NO: 787) |
| | 5′-CAGCUUCUUGCAGCGAUACAGCUCAGA-3′ | (SEQ ID NO: 2212) |
| | 3′-GUCGAAGAACGUCGCUAUGUCGAGUCU-5′ | (SEQ ID NO: 432) |
| EGFR-3461 Target: | 5′-CAGCTTCTTGCAGCGATACAGCTCAGA-3′ | (SEQ ID NO: 788) |
| | 5′-GCUUCUUGCAGCGAUACAGCUCAGACC-3′ | (SEQ ID NO: 2213) |
| | 3′-CGAAGAACGUCGCUAUGUCGAGUCUGG-5′ | (SEQ ID NO: 433) |
| EGFR-3463 Target: | 5′-GCTTCTTGCAGCGATACAGCTCAGACC-3′ | (SEQ ID NO: 789) |
| | 5′-CCACAAAGCAGUGAAUUUAUUGGAGCA-3′ | (SEQ ID NO: 2214) |
| | 3′-GGUGUUUCGUCACUUAAAUAACCUCGU-5′ | (SEQ ID NO: 434) |
| EGFR-3876 Target: | 5′-CCACAAAGCAGTGAATTTATTGGAGCA-3′ | (SEQ ID NO: 790) |
| | 5′-GUAUAUUUGAAAAAAAAAAAAAGUAUA-3′ | (SEQ ID NO: 2215) |
| | 3′-CAUAUAAACUUUUUUUUUUUUUCAUAU-5′ | (SEQ ID NO: 435) |
| EGFR-4178 Target: | 5′-GTATATTTGAAAAAAAAAAAAAGTATA-3′ | (SEQ ID NO: 791) |
| | 5′-UGUGAGGAUUUUUAUUGAUUGGGGAUC-3′ | (SEQ ID NO: 2216) |
| | 3′-ACACUCCUAAAAAUAACUAACCCCUAG-5′ | (SEQ ID NO: 436) |
| EGFR-4205 Target: | 5′-TGTGAGGATTTTTATTGATTGGGGATC-3′ | (SEQ ID NO: 792) |
| | 5′-CGCUAUUGAUUUUUACUUCAAUGGGCU-3′ | (SEQ ID NO: 2217) |
| | 3′-GCGAUAACUAAAAAUGAAGUUACCCGA-5′ | (SEQ ID NO: 437) |
| EGFR-4249 Target: | 5′-CGCTATTGATTTTTACTTCAATGGGCT-3′ | (SEQ ID NO: 793) |
| | 5′-AAGGAAGAAGCUUGCUGGUAGCACUUG-3′ | (SEQ ID NO: 2218) |
| | 3′-UUCCUUCUUCGAACGACCAUCGUGAAC-5′ | (SEQ ID NO: 438) |
| EGFR-4284 Target: | 5′-AAGGAAGAAGCTTGCTGGTAGCACTTG-3′ | (SEQ ID NO: 794) |
| | 5′-AGGAAGAAGCUUGCUGGUAGCACUUGC-3′ | (SEQ ID NO: 2219) |
| | 3′-UCCUUCUUCGAACGACCAUCGUGAACG-5′ | (SEQ ID NO: 439) |
| EGFR-4285 Target: | 5′-AGGAAGAAGCTTGCTGGTAGCACTTGC-3′ | (SEQ ID NO: 795) |
| | 5′-GGAAGAAGCUUGCUGGUAGCACUUGCU-3′ | (SEQ ID NO: 2220) |
| | 3′-CCUUCUUCGAACGACCAUCGUGAACGA-5′ | (SEQ ID NO: 440) |
| EGFR-4286 Target: | 5′-GGAAGAAGCTTGCTGGTAGCACTTGCT-3′ | (SEQ ID NO: 796) |
| | 5′-GAAGAAGCUUGCUGGUAGCACUUGCUA-3′ | (SEQ ID NO: 2221) |
| | 3′-CUUCUUCGAACGACCAUCGUGAACGAU-5′ | (SEQ ID NO: 441) |
| EGFR-4287 Target: | 5′-GAAGAAGCTTGCTGGTAGCACTTGCTA-3′ | (SEQ ID NO: 797) |
| | 5′-AAGAAGCUUGCUGGUAGCACUUGCUAC-3′ | (SEQ ID NO: 2222) |
| | 3′-UUCUUCGAACGACCAUCGUGAACGAUG-5′ | (SEQ ID NO: 442) |
| EGFR-4288 Target: | 5′-AAGAAGCTTGCTGGTAGCACTTGCTAC-3′ | (SEQ ID NO: 798) |
| | 5′-GAAGCUUGCUGGUAGCACUUGCUACCC-3′ | (SEQ ID NO: 2223) |
| | 3′-CUUCGAACGACCAUCGUGAACGAUGGG-5′ | (SEQ ID NO: 443) |
| EGFR-4290 Target: | 5′-GAAGCTTGCTGGTAGCACTTGCTACCC-3′ | (SEQ ID NO: 799) |
| | 5′-AAGCUUGCUGGUAGCACUUGCUACCCU-3′ | (SEQ ID NO: 2224) |
| | 3′-UUCGAACGACCAUCGUGAACGAUGGGA-5′ | (SEQ ID NO: 444) |
| EGFR-4291 Target: | 5′-AAGCTTGCTGGTAGCACTTGCTACCCT-3′ | (SEQ ID NO: 800) |
| | 5′-AGCUUGCUGGUAGCACUUGCUACCCUG-3′ | (SEQ ID NO: 2225) |
| | 3′-UCGAACGACCAUCGUGAACGAUGGGAC-5′ | (SEQ ID NO: 445) |
| EGFR-4292 Target: | 5′-AGCTTGCTGGTAGCACTTGCTACCCTG-3′ | (SEQ ID NO: 801) |
| | 5′-GCUUGCUGGUAGCACUUGCUACCCUGA-3′ | (SEQ ID NO: 2226) |
| | 3′-CGAACGACCAUCGUGAACGAUGGGACU-5′ | (SEQ ID NO: 446) |
| EGFR-4293 Target: | 5′-GCTTGCTGGTAGCACTTGCTACCCTGA-3′ | (SEQ ID NO: 802) |
| | 5′-CUUGCUGGUAGCACUUGCUACCCUGAG-3′ | (SEQ ID NO: 2227) |
| | 3′-GAACGACCAUCGUGAACGAUGGGACUC-5′ | (SEQ ID NO: 447) |
| EGFR-4294 Target: | 5′-CTTGCTGGTAGCACTTGCTACCCTGAG-3′ | (SEQ ID NO: 803) |
| | 5′-UUGCUGGUAGCACUUGCUACCCUGAGU-3′ | (SEQ ID NO: 2228) |
| | 3′-AACGACCAUCGUGAACGAUGGGACUCA-5′ | (SEQ ID NO: 448) |
| EGFR-4295 Target: | 5′-TTGCTGGTAGCACTTGCTACCCTGAGT-3′ | (SEQ ID NO: 804) |
| | 5′-GGAUGCUUGAUUCCAGUGGUUCUGCUU-3′ | (SEQ ID NO: 2229) |
| | 3′-CCUACGAACUAAGGUCACCAAGACGAA-5′ | (SEQ ID NO: 449) |
| EGFR-4372 Target: | 5′-GGATGCTTGATTCCAGTGGTTCTGCTT-3′ | (SEQ ID NO: 805) |
| | 5′-GAUGCUUGAUUCCAGUGGUUCUGCUUC-3′ | (SEQ ID NO: 2230) |
| | 3′-CUACGAACUAAGGUCACCAAGACGAAG-5′ | (SEQ ID NO: 450) |
| EGFR-4373 Target: | 5′-GATGCTTGATTCCAGTGGTTCTGCTTC-3′ | (SEQ ID NO: 806) |
| | 5′-AGCAGGCCGGAUCGGUACUGUAUCAAG-3′ | (SEQ ID NO: 2231) |
| | 3′-UCGUCCGGCCUAGCCAUGACAUAGUUC-5′ | (SEQ ID NO: 451) |
| EGFR-4450 Target: | 5′-AGCAGGCCGGATCGGTACTGTATCAAG-3′ | (SEQ ID NO: 807) |
| | 5′-GCCGGAUCGGUACUGUAUCAAGUCAUG-3′ | (SEQ ID NO: 2232) |
| | 3′-CGGCCUAGCCAUGACAUAGUUCAGUAC-5′ | (SEQ ID NO: 452) |
| EGFR-4455 Target: | 5′-GCCGGATCGGTACTGTATCAAGTCATG-3′ | (SEQ ID NO: 808) |
| | 5′-UCCUUAGACUUACUUUUGUAAAAAUGU-3′ | (SEQ ID NO: 2233) |
| | 3′-AGGAAUCUGAAUGAAAACAUUUUUACA-5′ | (SEQ ID NO: 453) |
| EGFR-4550 Target: | 5′-TCCTTAGACTTACTTTTGTAAAAATGT-3′ | (SEQ ID NO: 809) |
| | 5′-CUGUCUUGCUGUCAUGAAAUCAGCAAG-3′ | (SEQ ID NO: 2234) |
| | 3′-GACAGAACGACAGUACUUUAGUCGUUC-5′ | (SEQ ID NO: 454) |
| EGFR-4684 Target: | 5′-CTGTCTTGCTGTCATGAAATCAGCAAG-3′ | (SEQ ID NO: 810) |
| | 5′-CCUAAGGAUAGCACCGCUUUUGUUCUC-3′ | (SEQ ID NO: 2235) |
| | 3′-GGAUUCCUAUCGUGGCGAAAACAAGAG-5′ | (SEQ ID NO: 455) |
| EGFR-4804 Target: | 5′-CCTAAGGATAGCACCGCTTTTGTTCTC-3′ | (SEQ ID NO: 811) |
| | 5′-UAAGGAUAGCACCGCUUUUGUUCUCGC-3′ | (SEQ ID NO: 2236) |
| | 3′-AUUCCUAUCGUGGCGAAAACAAGAGCG-5′ | (SEQ ID NO: 456) |
| EGFR-4806 Target: | 5′-TAAGGATAGCACCGCTTTTGTTCTCGC-3′ | (SEQ ID NO: 812) |
| | 5′-AAGGAUAGCACCGCUUUUGUUCUCGCA-3′ | (SEQ ID NO: 2237) |
| | 3′-UUCCUAUCGUGGCGAAAACAAGAGCGU-5′ | (SEQ ID NO: 457) |
| EGFR-4807 Target: | 5′-AAGGATAGCACCGCTTTTGTTCTCGCA-3′ | (SEQ ID NO: 813) |
| | 5′-AGGAUAGCACCGCUUUUGUUCUCGCAA-3′ | (SEQ ID NO: 2238) |
| | 3′-UCCUAUCGUGGCGAAAACAAGAGCGUU-5′ | (SEQ ID NO: 458) |
| EGFR-4808 Target: | 5′-AGGATAGCACCGCTTTTGTTCTCGCAA-3′ | (SEQ ID NO: 814) |
| | 5′-GGAUAGCACCGCUUUUGUUCUCGCAAA-3′ | (SEQ ID NO: 2239) |
| | 3′-CCUAUCGUGGCGAAAACAAGAGCGUUU-5′ | (SEQ ID NO: 459) |
| EGFR-4809 Target: | 5′-GGATAGCACCGCTTTTGTTCTCGCAAA-3′ | (SEQ ID NO: 815) |
| | 5′-GAUAGCACCGCUUUUGUUCUCGCAAAA-3′ | (SEQ ID NO: 2240) |
| | 3′-CUAUCGUGGCGAAAACAAGAGCGUUUU-5′ | (SEQ ID NO: 460) |
| EGFR-4810 Target: | 5′-GATAGCACCGCTTTTGTTCTCGCAAAA-3′ | (SEQ ID NO: 816) |
| | 5′-AUAGCACCGCUUUUGUUCUCGCAAAAA-3′ | (SEQ ID NO: 2241) |
| | 3′-UAUCGUGGCGAAAACAAGAGCGUUUUU-5′ | (SEQ ID NO: 461) |
| EGFR-4811 Target: | 5′-ATAGCACCGCTTTTGTTCTCGCAAAAA-3′ | (SEQ ID NO: 817) |
| | 5′-UAGCACCGCUUUUGUUCUCGCAAAAAC-3′ | (SEQ ID NO: 2242) |
| | 3′-AUCGUGGCGAAAACAAGAGCGUUUUUG-5′ | (SEQ ID NO: 462) |
| EGFR-4812 Target: | 5′-TAGCACCGCTTTTGTTCTCGCAAAAAC-3′ | (SEQ ID NO: 818) |
| | 5′-AGCACCGCUUUUGUUCUCGCAAAAACG-3′ | (SEQ ID NO: 2243) |
| | 3′-UCGUGGCGAAAACAAGAGCGUUUUUGC-5′ | (SEQ ID NO: 463) |
| EGFR-4813 Target: | 5′-AGCACCGCTTTTGTTCTCGCAAAAACG-3′ | (SEQ ID NO: 819) |
| | 5′-ACCGCUUUUGUUCUCGCAAAAACGUAU-3′ | (SEQ ID NO: 2244) |
| | 3′-UGGCGAAAACAAGAGCGUUUUUGCAUA-5′ | (SEQ ID NO: 464) |
| EGFR-4816 Target: | 5′-ACCGCTTTTGTTCTCGCAAAAACGTAT-3′ | (SEQ ID NO: 820) |
| | 5′-CCGCUUUUGUUCUCGCAAAAACGUAUC-3′ | (SEQ ID NO: 2245) |
| | 3′-GGCGAAAACAAGAGCGUUUUUGCAUAG-5′ | (SEQ ID NO: 465) |
| EGFR-4817 Target: | 5′-CCGCTTTTGTTCTCGCAAAAACGTATC-3′ | (SEQ ID NO: 821) |
| | 5′-CGCUUUUGUUCUCGCAAAAACGUAUCU-3′ | (SEQ ID NO: 2246) |
| | 3′-GCGAAAACAAGAGCGUUUUUGCAUAGA-5′ | (SEQ ID NO: 466) |
| EGFR-4818 Target: | 5′-CGCTTTTGTTCTCGCAAAAACGTATCT-3′ | (SEQ ID NO: 822) |
| | 5′-GCUUUUGUUCUCGCAAAAACGUAUCUC-3′ | (SEQ ID NO: 2247) |
| | 3′-CGAAAACAAGAGCGUUUUUGCAUAGAG-5′ | (SEQ ID NO: 467) |
| EGFR-4819 Target: | 5′-GCTTTTGTTCTCGCAAAAACGTATCTC-3′ | (SEQ ID NO: 823) |
| | 5′-UGUUCUCGCAAAAACGUAUCUCCUAAU-3′ | (SEQ ID NO: 2248) |
| | 3′-ACAAGAGCGUUUUUGCAUAGAGGAUUA-5′ | (SEQ ID NO: 468) |
| EGFR-4824 Target: | 5′-TGTTCTCGCAAAAACGTATCTCCTAAT-3′ | (SEQ ID NO: 824) |
| | 5′-CAAAAUUAGUUUGUGUUACUUAUGGAA-3′ | (SEQ ID NO: 2249) |
| | 3′-GUUUUAAUCAAACACAAUGAAUACCUU-5′ | (SEQ ID NO: 469) |
| EGFR-4953 Target: | 5′-CAAAATTAGTTTGTGTTACTTATGGAA-3′ | (SEQ ID NO: 825) |
| | 5′-ACUUAUGGAAGAUAGUUUUCUCCUUUU-3′ | (SEQ ID NO: 2250) |
| | 3′-UGAAUACCUUCUAUCAAAAGAGGAAAA-5′ | (SEQ ID NO: 470) |
| EGFR-4970 Target: | 5′-ACTTATGGAAGATAGTTTTCTCCTTTT-3′ | (SEQ ID NO: 826) |
| | 5′-CUUCAAAAGCUUUUUACUCAAAGAGUA-3′ | (SEQ ID NO: 2251) |
| | 3′-GAAGUUUUCGAAAAAUGAGUUUCUCAU-5′ | (SEQ ID NO: 471) |
| EGFR-5003 Target: | 5′-CTTCAAAAGCTTTTTACTCAAAGAGTA-3′ | (SEQ ID NO: 827) |
| | 5′-AAACUAGGGUUUGAAAUUGAUAAUGCU-3′ | (SEQ ID NO: 2252) |
| | 3′-UUUGAUCCCAAACUUUAACUAUUACGA-5′ | (SEQ ID NO: 472) |
| EGFR-5206 Target: | 5′-AAACTAGGGTTTGAAATTGATAATGCT-3′ | (SEQ ID NO: 828) |
| | 5′-CCUAAAAUAAUUUCUCUACAAUUGGAA-3′ | (SEQ ID NO: 2253) |
| | 3′-GGAUUUUAUUAAAGAGAUGUUAACCUU-5′ | (SEQ ID NO: 473) |
| EGFR-5275 Target: | 5′-CCTAAAATAATTTCTCTACAATTGGAA-3′ | (SEQ ID NO: 829) |
| | 5′-AACAGCAGUCCUUUGUAAACAGUGUUU-3′ | (SEQ ID NO: 2254) |
| | 3′-UUGUCGUCAGGAAACAUUUGUCACAAA-5′ | (SEQ ID NO: 474) |
| EGFR-5374 Target: | 5′-AACAGCAGTCCTTTGTAAACAGTGTTT-3′ | (SEQ ID NO: 830) |
| | 5′-UCCAAUUUAUCAAGGAAGAAAUGGUUC-3′ | (SEQ ID NO: 2255) |
| | 3′-AGGUUAAAUAGUUCCUUCUUUACCAAG-5′ | (SEQ ID NO: 475) |
| EGFR-5429 Target: | 5′-TCCAATTTATCAAGGAAGAAATGGTTC-3′ | (SEQ ID NO: 831) |
| | 5′-CAUACAAAAUGUUCCUUUUGCUUUUAA-3′ | (SEQ ID NO: 2256) |
| | 3′-GUAUGUUUUACAAGGAAAACGAAAAUU-5′ | (SEQ ID NO: 476) |
| EGFR-5497 Target: | 5′-CATACAAAATGTTCCTTTTGCTTTTAA-3′ | (SEQ ID NO: 832) |
| | 5′-AUGUUCCUUUUGCUUUUAAAGUAAUUU-3′ | (SEQ ID NO: 2257) |
| | 3′-UACAAGGAAAACGAAAAUUUCAUUAAA-5′ | (SEQ ID NO: 477) |
| EGFR-5505 Target: | 5′-ATGTTCCTTTTGCTTTTAAAGTAATTT-3′ | (SEQ ID NO: 833) |
| | 5′-UGUUCCUUUUGCUUUUAAAGUAAUUUU-3′ | (SEQ ID NO: 2258) |
| | 3′-ACAAGGAAAACGAAAAUUUCAUUAAAA-5′ | (SEQ ID NO: 478) |
| EGFR-5506 Target: | 5′-TGTTCCTTTTGCTTTTAAAGTAATTTT-3′ | (SEQ ID NO: 834) |
| | 5′-UUUUGCUUUUAAAGUAAUUUUUGACUC-3′ | (SEQ ID NO: 2259) |
| | 3′-AAAACGAAAAUUUCAUUAAAAACUGAG-5′ | (SEQ ID NO: 479) |
| EGFR-5512 Target: | 5′-TTTTGCTTTTAAAGTAATTTTTGACTC-3′ | (SEQ ID NO: 835) |
| | 5′-UUGUUAAGAAAGUAUUUGAUUUUUGUC-3′ | (SEQ ID NO: 2260) |
| | 3′-AACAAUUCUUUCAUAAACUAAAAACAG-5′ | (SEQ ID NO: 480) |
| EGFR-5565 Target: | 5′-TTGTTAAGAAAGTATTTGATTTTTGTC-3′ | (SEQ ID NO: 836) |
| | 5′-AUUUGGAAAUUACCUAUGUGCAGAGGA-3′ | (SEQ ID NO: 2261) |
| | 3′-UAAACCUUUAAUGGAUACACGUCUCCU-5′ | (SEQ ID NO: 481) |
| EGFR-463 Target: | 5′-ATTTGGAAATTACCTATGTGCAGAGGA-3′ | (SEQ ID NO: 837) |
| | 5′-UUUGGAAAUUACCUAUGUGCAGAGGAA-3′ | (SEQ ID NO: 2262) |
| | 3′-AAACCUUUAAUGGAUACACGUCUCCUU-5′ | (SEQ ID NO: 482) |
| EGFR-464 Target: | 5′-TTTGGAAATTACCTATGTGCAGAGGAA-3′ | (SEQ ID NO: 838) |
| | 5′-AUCUUUCCUUCUUAAAGACCAUCCAGG-3′ | (SEQ ID NO: 2263) |
| | 3′-UAGAAAGGAAGAAUUUCUGGUAGGUCC-5′ | (SEQ ID NO: 483) |
| EGFR-496 Target: | 5′-ATCTTTCCTTCTTAAAGACCATCCAGG-3′ | (SEQ ID NO: 839) |
| | 5′-UCUUUCCUUCUUAAAGACCAUCCAGGA-3′ | (SEQ ID NO: 2264) |
| | 3′-AGAAAGGAAGAAUUUCUGGUAGGUCCU-5′ | (SEQ ID NO: 484) |
| EGFR-497 Target: | 5′-TCTTTCCTTCTTAAAGACCATCCAGGA-3′ | (SEQ ID NO: 840) |
| | 5′-CUUUCCUUCUUAAAGACCAUCCAGGAG-3′ | (SEQ ID NO: 2265) |
| | 3′-GAAAGGAAGAAUUUCUGGUAGGUCCUC-5′ | (SEQ ID NO: 485) |
| EGFR-498 Target: | 5′-CTTTCCTTCTTAAAGACCATCCAGGAG-3′ | (SEQ ID NO: 841) |
| | 5′-UUUCCUUCUUAAAGACCAUCCAGGAGG-3′ | (SEQ ID NO: 2266) |
| | 3′-AAAGGAAGAAUUUCUGGUAGGUCCUCC-5′ | (SEQ ID NO: 486) |
| EGFR-499 Target: | 5′-TTTCCTTCTTAAAGACCATCCAGGAGG-3′ | (SEQ ID NO: 842) |
| | 5′-UUCCUUCUUAAAGACCAUCCAGGAGGU-3′ | (SEQ ID NO: 2267) |
| | 3′-AAGGAAGAAUUUCUGGUAGGUCCUCCA-5′ | (SEQ ID NO: 487) |
| EGFR-500 Target: | 5′-TTCCTTCTTAAAGACCATCCAGGAGGT-3′ | (SEQ ID NO: 843) |
| | 5′-UCCUUCUUAAAGACCAUCCAGGAGGUG-3′ | (SEQ ID NO: 2268) |
| | 3′-AGGAAGAAUUUCUGGUAGGUCCUCCAC-5′ | (SEQ ID NO: 488) |
| EGFR-501 Target: | 5′-TCCTTCTTAAAGACCATCCAGGAGGTG-3′ | (SEQ ID NO: 844) |
| | 5′-CCUUCUUAAAGACCAUCCAGGAGGUGG-3′ | (SEQ ID NO: 2269) |
| | 3′-GGAAGAAUUUCUGGUAGGUCCUCCACC-5′ | (SEQ ID NO: 489) |
| EGFR-502 Target: | 5′-CCTTCTTAAAGACCATCCAGGAGGTGG-3′ | (SEQ ID NO: 845) |
| | 5′-CUUCUUAAAGACCAUCCAGGAGGUGGC-3′ | (SEQ ID NO: 2270) |
| | 3′-GAAGAAUUUCUGGUAGGUCCUCCACCG-5′ | (SEQ ID NO: 490) |
| EGFR-503 Target: | 5′-CTTCTTAAAGACCATCCAGGAGGTGGC-3′ | (SEQ ID NO: 846) |
| | 5′-UUCUUAAAGACCAUCCAGGAGGUGGCU-3′ | (SEQ ID NO: 2271) |
| | 3′-AAGAAUUUCUGGUAGGUCCUCCACCGA-5′ | (SEQ ID NO: 491) |
| EGFR-504 Target: | 5′-TTCTTAAAGACCATCCAGGAGGTGGCT-3′ | (SEQ ID NO: 847) |
| | 5′-UCUUAAAGACCAUCCAGGAGGUGGCUG-3′ | (SEQ ID NO: 2272) |
| | 3′-AGAAUUUCUGGUAGGUCCUCCACCGAC-5′ | (SEQ ID NO: 492) |
| EGFR-505 Target: | 5′-TCTTAAAGACCATCCAGGAGGTGGCTG-3′ | (SEQ ID NO: 848) |
| | 5′-CUUAAAGACCAUCCAGGAGGUGGCUGG-3′ | (SEQ ID NO: 2273) |
| | 3′-GAAUUUCUGGUAGGUCCUCCACCGACC-5′ | (SEQ ID NO: 493) |
| EGFR-506 Target: | 5′-CTTAAAGACCATCCAGGAGGTGGCTGG-3′ | (SEQ ID NO: 849) |
| | 5′-UUAAAGACCAUCCAGGAGGUGGCUGGU-3′ | (SEQ ID NO: 2274) |
| | 3′-AAUUUCUGGUAGGUCCUCCACCGACCA-5′ | (SEQ ID NO: 494) |
| EGFR-507 Target: | 5′-TTAAAGACCATCCAGGAGGTGGCTGGT-3′ | (SEQ ID NO: 850) |
| | 5′-UAAAGACCAUCCAGGAGGUGGCUGGUU-3′ | (SEQ ID NO: 2275) |
| | 3′-AUUUCUGGUAGGUCCUCCACCGACCAA-5′ | (SEQ ID NO: 495) |
| EGFR-508 Target: | 5′-TAAAGACCATCCAGGAGGTGGCTGGTT-3′ | (SEQ ID NO: 851) |
| | 5′-AAAGACCAUCCAGGAGGUGGCUGGUUA-3′ | (SEQ ID NO: 2276) |
| | 3′-UUUCUGGUAGGUCCUCCACCGACCAAU-5′ | (SEQ ID NO: 496) |
| EGFR-509 Target: | 5′-AAAGACCATCCAGGAGGTGGCTGGTTA-3′ | (SEQ ID NO: 852) |
| | 5′-AGUGUGAUCCAAGCUGUCCCAAUGGGA-3′ | (SEQ ID NO: 2277) |
| | 3′-UCACACUAGGUUCGACAGGGUUACCCU-5′ | (SEQ ID NO: 497) |
| EGFR-838 Target: | 5′-AGTGTGATCCAAGCTGTCCCAATGGGA-3′ | (SEQ ID NO: 853) |
| | 5′-GUGUGAUCCAAGCUGUCCCAAUGGGAG-3′ | (SEQ ID NO: 2278) |
| | 3′-CACACUAGGUUCGACAGGGUUACCCUC-5′ | (SEQ ID NO: 498) |
| EGFR-839 Target: | 5′-GTGTGATCCAAGCTGTCCCAATGGGAG-3′ | (SEQ ID NO: 854) |
| | 5′-UGUGAUCCAAGCUGUCCCAAUGGGAGC-3′ | (SEQ ID NO: 2279) |
| | 3′-ACACUAGGUUCGACAGGGUUACCCUCG-5′ | (SEQ ID NO: 499) |
| EGFR-840 Target: | 5′-TGTGATCCAAGCTGTCCCAATGGGAGC-3′ | (SEQ ID NO: 855) |
| | 5′-GUGAUCCAAGCUGUCCCAAUGGGAGCU-3′ | (SEQ ID NO: 2280) |
| | 3′-CACUAGGUUCGACAGGGUUACCCUCGA-5′ | (SEQ ID NO: 500) |
| EGFR-841 Target: | 5′-GTGATCCAAGCTGTCCCAATGGGAGCT-3′ | (SEQ ID NO: 856) |
| | 5′-UGAUCCAAGCUGUCCCAAUGGGAGCUG-3′ | (SEQ ID NO: 2281) |
| | 3′-ACUAGGUUCGACAGGGUUACCCUCGAC-5′ | (SEQ ID NO: 501) |
| EGFR-842 Target: | 5′-TGATCCAAGCTGTCCCAATGGGAGCTG-3′ | (SEQ ID NO: 857) |
| | 5′-GCAGGAGAGGAGAACUGCCAGAAACUG-3′ | (SEQ ID NO: 2282) |
| | 3′-CGUCCUCUCCUCUUGACGGUCUUUGAC-5′ | (SEQ ID NO: 502) |
| EGFR-876 Target: | 5′-GCAGGAGAGGAGAACTGCCAGAAACTG-3′ | (SEQ ID NO: 858) |
| | 5′-CAGGAGAGGAGAACUGCCAGAAACUGA-3′ | (SEQ ID NO: 2283) |
| | 3′-GUCCUCUCCUCUUGACGGUCUUUGACU-5′ | (SEQ ID NO: 503) |
| EGFR-877 Target: | 5′-CAGGAGAGGAGAACTGCCAGAAACTGA-3′ | (SEQ ID NO: 859) |
| | 5′-AGGAGAGGAGAACUGCCAGAAACUGAC-3′ | (SEQ ID NO: 2284) |
| | 3′-UCCUCUCCUCUUGACGGUCUUUGACUG-5′ | (SEQ ID NO: 504) |
| EGFR-878 Target: | 5′-AGGAGAGGAGAACTGCCAGAAACTGAC-3′ | (SEQ ID NO: 860) |
| | 5′-GGAGAGGAGAACUGCCAGAAACUGACC-3′ | (SEQ ID NO: 2285) |
| | 3′-CCUCUCCUCUUGACGGUCUUUGACUGG-5′ | (SEQ ID NO: 505) |
| EGFR-879 Target: | 5′-GGAGAGGAGAACTGCCAGAAACTGACC-3′ | (SEQ ID NO: 861) |
| | 5′-ACUGACCAAAAUCAUCUGUGCCCAGCA-3′ | (SEQ ID NO: 2286) |
| | 3′-UGACUGGUUUUAGUAGACACGGGUCGU-5′ | (SEQ ID NO: 506) |
| EGFR-899 Target: | 5′-ACTGACCAAAATCATCTGTGCCCAGCA-3′ | (SEQ ID NO: 862) |
| | 5′-CUGACCAAAAUCAUCUGUGCCCAGCAG-3′ | (SEQ ID NO: 2287) |
| | 3′-GACUGGUUUUAGUAGACACGGGUCGUC-5′ | (SEQ ID NO: 507) |
| EGFR-900 Target: | 5′-CTGACCAAAATCATCTGTGCCCAGCAG-3′ | (SEQ ID NO: 863) |
| | 5′-UGACCAAAAUCAUCUGUGCCCAGCAGU-3′ | (SEQ ID NO: 2288) |
| | 3′-ACUGGUUUUAGUAGACACGGGUCGUCA-5′ | (SEQ ID NO: 508) |
| EGFR-901 Target: | 5′-TGACCAAAATCATCTGTGCCCAGCAGT-3′ | (SEQ ID NO: 864) |
| | 5′-GACCAAAAUCAUCUGUGCCCAGCAGUG-3′ | (SEQ ID NO: 2289) |
| | 3′-CUGGUUUUAGUAGACACGGGUCGUCAC-5′ | (SEQ ID NO: 509) |
| EGFR-902 Target: | 5′-GACCAAAATCATCTGTGCCCAGCAGTG-3′ | (SEQ ID NO: 865) |
| | 5′-ACCAAAAUCAUCUGUGCCCAGCAGUGC-3′ | (SEQ ID NO: 2290) |
| | 3′-UGGUUUUAGUAGACACGGGUCGUCACG-5′ | (SEQ ID NO: 510) |
| EGFR-903 Target: | 5′-ACCAAAATCATCTGTGCCCAGCAGTGC-3′ | (SEQ ID NO: 866) |
| | 5′-CCAAAAUCAUCUGUGCCCAGCAGUGCU-3′ | (SEQ ID NO: 2291) |
| | 3′-GGUUUUAGUAGACACGGGUCGUCACGA-5′ | (SEQ ID NO: 511) |
| EGFR-904 Target: | 5′-CCAAAATCATCTGTGCCCAGCAGTGCT-3′ | (SEQ ID NO: 867) |
| | 5′-CAAAAUCAUCUGUGCCCAGCAGUGCUC-3′ | (SEQ ID NO: 2292) |
| | 3′-GUUUUAGUAGACACGGGUCGUCACGAG-5′ | (SEQ ID NO: 512) |
| EGFR-905 Target: | 5′-CAAAATCATCTGTGCCCAGCAGTGCTC-3′ | (SEQ ID NO: 868) |
| | 5′-CCCAGUGACUGCUGCCACAACCAGUGU-3′ | (SEQ ID NO: 2293) |
| | 3′-GGGUCACUGACGACGGUGUUGGUCACA-5′ | (SEQ ID NO: 513) |
| EGFR-954 Target: | 5′-CCCAGTGACTGCTGCCACAACCAGTGT-3′ | (SEQ ID NO: 869) |
| | 5′-CCAGUGACUGCUGCCACAACCAGUGUG-3′ | (SEQ ID NO: 2294) |
| | 3′-GGUCACUGACGACGGUGUUGGUCACAC-5′ | (SEQ ID NO: 514) |
| EGFR-955 Target: | 5′-CCAGTGACTGCTGCCACAACCAGTGTG-3′ | (SEQ ID NO: 870) |
| | 5′-CAGUGACUGCUGCCACAACCAGUGUGC-3′ | (SEQ ID NO: 2295) |
| | 3′-GUCACUGACGACGGUGUUGGUCACACG-5′ | (SEQ ID NO: 515) |
| EGFR-956 Target: | 5′-CAGTGACTGCTGCCACAACCAGTGTGC-3′ | (SEQ ID NO: 871) |
| | 5′-CUCACUCUCCAUAAAUGCUACGAAUAU-3′ | (SEQ ID NO: 2296) |
| | 3′-GAGUGAGAGGUAUUUACGAUGCUUAUA-5′ | (SEQ ID NO: 516) |
| EGFR-1313 Target: | 5′-CTCACTCTCCATAAATGCTACGAATAT-3′ | (SEQ ID NO: 872) |
| | 5′-GGUUUUUGCUGAUUCAGGCUUGGCCUG-3′ | (SEQ ID NO: 2297) |
| | 3′-CCAAAAACGACUAAGUCCGAACCGGAC-5′ | (SEQ ID NO: 517) |
| EGFR-1480 Target: | 5′-GGTTTTTGCTGATTCAGGCTTGGCCTG-3′ | (SEQ ID NO: 873) |
| | 5′-GUUUUUGCUGAUUCAGGCUUGGCCUGA-3′ | (SEQ ID NO: 2298) |
| | 3′-CAAAAACGACUAAGUCCGAACCGGACU-5′ | (SEQ ID NO: 518) |
| EGFR-1481 Target: | 5′-GTTTTTGCTGATTCAGGCTTGGCCTGA-3′ | (SEQ ID NO: 874) |
| | 5′-UUUUUGCUGAUUCAGGCUUGGCCUGAA-3′ | (SEQ ID NO: 2299) |
| | 3′-AAAAACGACUAAGUCCGAACCGGACUU-5′ | (SEQ ID NO: 519) |
| EGFR-1482 Target: | 5′-TTTTTGCTGATTCAGGCTTGGCCTGAA-3′ | (SEQ ID NO: 875) |
| | 5′-UUUUGCUGAUUCAGGCUUGGCCUGAAA-3′ | (SEQ ID NO: 2300) |
| | 3′-AAAACGACUAAGUCCGAACCGGACUUU-5′ | (SEQ ID NO: 520) |
| EGFR-1483 Target: | 5′-TTTTGCTGATTCAGGCTTGGCCTGAAA-3′ | (SEQ ID NO: 876) |
| | 5′-UUUGCUGAUUCAGGCUUGGCCUGAAAA-3′ | (SEQ ID NO: 2301) |
| | 3′-AAACGACUAAGUCCGAACCGGACUUUU-5′ | (SEQ ID NO: 521) |
| EGFR-1484 Target: | 5′-TTTGCTGATTCAGGCTTGGCCTGAAAA-3′ | (SEQ ID NO: 877) |
| | 5′-UUGCUGAUUCAGGCUUGGCCUGAAAAC-3′ | (SEQ ID NO: 2302) |
| | 3′-AACGACUAAGUCCGAACCGGACUUUUG-5′ | (SEQ ID NO: 522) |
| EGFR-1485 Target: | 5′-TTGCTGATTCAGGCTTGGCCTGAAAAC-3′ | (SEQ ID NO: 878) |
| | 5′-UGCUGAUUCAGGCUUGGCCUGAAAACA-3′ | (SEQ ID NO: 2303) |
| | 3′-ACGACUAAGUCCGAACCGGACUUUUGU-5′ | (SEQ ID NO: 523) |
| EGFR-1486 Target: | 5′-TGCTGATTCAGGCTTGGCCTGAAAACA-3′ | (SEQ ID NO: 879) |
| | 5′-GCUGAUUCAGGCUUGGCCUGAAAACAG-3′ | (SEQ ID NO: 2304) |
| | 3′-CGACUAAGUCCGAACCGGACUUUUGUC-5′ | (SEQ ID NO: 524) |
| EGFR-1487 Target: | 5′-GCTGATTCAGGCTTGGCCTGAAAACAG-3′ | (SEQ ID NO: 880) |
| | 5′-CCAAGCAACAUGGUCAGUUUUCUCUUG-3′ | (SEQ ID NO: 2305) |
| | 3′-GGUUCGUUGUACCAGUCAAAAGAGAAC-5′ | (SEQ ID NO: 525) |
| EGFR-1561 Target: | 5′-CCAAGCAACATGGTCAGTTTTCTCTTG-3′ | (SEQ ID NO: 881) |
| | 5′-CAAGCAACAUGGUCAGUUUUCUCUUGC-3′ | (SEQ ID NO: 2306) |
| | 3′-GUUCGUUGUACCAGUCAAAAGAGAACG-5′ | (SEQ ID NO: 526) |
| EGFR-1562 Target: | 5′-CAAGCAACATGGTCAGTTTTCTCTTGC-3′ | (SEQ ID NO: 882) |
| | 5′-AAGCAACAUGGUCAGUUUUCUCUUGCA-3′ | (SEQ ID NO: 2307) |
| | 3′-UUCGUUGUACCAGUCAAAAGAGAACGU-5′ | (SEQ ID NO: 527) |
| EGFR-1563 Target: | 5′-AAGCAACATGGTCAGTTTTCTCTTGCA-3′ | (SEQ ID NO: 883) |
| | 5′-UACAAUAAACUGGAAAAAACUGUUUGG-3′ | (SEQ ID NO: 2308) |
| | 3′-AUGUUAUUUGACCUUUUUUGACAAACC-5′ | (SEQ ID NO: 528) |
| EGFR-1691 Target: | 5′-TACAATAAACTGGAAAAAACTGTTTGG-3′ | (SEQ ID NO: 884) |
| | 5′-CUCAGGCCAUGAACAUCACCUGCACAG-3′ | (SEQ ID NO: 2309) |
| | 3′-GAGUCCGGUACUUGUAGUGGACGUGUC-5′ | (SEQ ID NO: 529) |
| EGFR-1963 Target: | 5′-CTCAGGCCATGAACATCACCTGCACAG-3′ | (SEQ ID NO: 885) |
| | 5′-UCAGGCCAUGAACAUCACCUGCACAGG-3′ | (SEQ ID NO: 2310) |
| | 3′-AGUCCGGUACUUGUAGUGGACGUGUCC-5′ | (SEQ ID NO: 530) |
| EGFR-1964 Target: | 5′-TCAGGCCATGAACATCACCTGCACAGG-3′ | (SEQ ID NO: 886) |
| | 5′-GUAUCCAGUGUGCCCACUACAUUGACG-3′ | (SEQ ID NO: 2311) |
| | 3′-CAUAGGUCACACGGGUGAUGUAACUGC-5′ | (SEQ ID NO: 531) |
| EGFR-2008 Target: | 5′-GTATCCAGTGTGCCCACTACATTGACG-3′ | (SEQ ID NO: 887) |
| | 5′-UAUCCAGUGUGCCCACUACAUUGACGG-3′ | (SEQ ID NO: 2312) |
| | 3′-AUAGGUCACACGGGUGAUGUAACUGCC-5′ | (SEQ ID NO: 532) |
| EGFR-2009 Target: | 5′-TATCCAGTGTGCCCACTACATTGACGG-3′ | (SEQ ID NO: 888) |
| | 5′-AUCCAGUGUGCCCACUACAUUGACGGC-3′ | (SEQ ID NO: 2313) |
| | 3′-UAGGUCACACGGGUGAUGUAACUGCCG-5′ | (SEQ ID NO: 533) |
| EGFR-2010 Target: | 5′-ATCCAGTGTGCCCACTACATTGACGGC-3′ | (SEQ ID NO: 889) |
| | 5′-UCCAGUGUGCCCACUACAUUGACGGCC-3′ | (SEQ ID NO: 2314) |
| | 3′-AGGUCACACGGGUGAUGUAACUGCCGG-5′ | (SEQ ID NO: 534) |
| EGFR-2011 Target: | 5′-TCCAGTGTGCCCACTACATTGACGGCC-3′ | (SEQ ID NO: 890) |
| | 5′-CCAGUGUGCCCACUACAUUGACGGCCC-3′ | (SEQ ID NO: 2315) |
| | 3′-GGUCACACGGGUGAUGUAACUGCCGGG-5′ | (SEQ ID NO: 535) |
| EGFR-2012 Target: | 5′-CCAGTGTGCCCACTACATTGACGGCCC-3′ | (SEQ ID NO: 891) |
| | 5′-CUGAAUUCAAAAAGAUCAAAGUGCUGG-3′ | (SEQ ID NO: 2316) |
| | 3′-GACUUAAGUUUUUCUAGUUUCACGACC-5′ | (SEQ ID NO: 536) |
| EGFR-2401 Target: | 5′-CTGAATTCAAAAAGATCAAAGTGCTGG-3′ | (SEQ ID NO: 892) |
| | 5′-UGAAUUCAAAAAGAUCAAAGUGCUGGG-3′ | (SEQ ID NO: 2317) |
| | 3′-ACUUAAGUUUUUCUAGUUUCACGACCC-5′ | (SEQ ID NO: 537) |
| EGFR-2402 Target: | 5′-TGAATTCAAAAAGATCAAAGTGCTGGG-3′ | (SEQ ID NO: 893) |
| | 5′-GACUCUGGAUCCCAGAAGGUGAGAAAG-3′ | (SEQ ID NO: 2318) |
| | 3′-CUGAGACCUAGGGUCUUCCACUCUUUC-5′ | (SEQ ID NO: 538) |
| EGFR-2458 Target: | 5′-GACTCTGGATCCCAGAAGGTGAGAAAG-3′ | (SEQ ID NO: 894) |
| | 5′-ACUCUGGAUCCCAGAAGGUGAGAAAGU-3′ | (SEQ ID NO: 2319) |
| | 3′-UGAGACCUAGGGUCUUCCACUCUUUCA-5′ | (SEQ ID NO: 539) |
| EGFR-2459 Target: | 5′-ACTCTGGATCCCAGAAGGTGAGAAAGT-3′ | (SEQ ID NO: 895) |
| | 5′-CUCUGGAUCCCAGAAGGUGAGAAAGUU-3′ | (SEQ ID NO: 2320) |
| | 3′-GAGACCUAGGGUCUUCCACUCUUUCAA-5′ | (SEQ ID NO: 540) |
| EGFR-2460 Target: | 5′-CTCTGGATCCCAGAAGGTGAGAAAGTT-3′ | (SEQ ID NO: 896) |
| | 5′-UCUGGAUCCCAGAAGGUGAGAAAGUUA-3′ | (SEQ ID NO: 2321) |
| | 3′-AGACCUAGGGUCUUCCACUCUUUCAAU-5′ | (SEQ ID NO: 541) |
| EGFR-2461 Target: | 5′-TCTGGATCCCAGAAGGTGAGAAAGTTA-3′ | (SEQ ID NO: 897) |
| | 5′-CUGGAUCCCAGAAGGUGAGAAAGUUAA-3′ | (SEQ ID NO: 2322) |
| | 3′-GACCUAGGGUCUUCCACUCUUUCAAUU-5′ | (SEQ ID NO: 542) |
| EGFR-2462 Target: | 5′-CTGGATCCCAGAAGGTGAGAAAGTTAA-3′ | (SEQ ID NO: 898) |
| | 5′-UGGAUCCCAGAAGGUGAGAAAGUUAAA-3′ | (SEQ ID NO: 2323) |
| | 3′-ACCUAGGGUCUUCCACUCUUUCAAUUU-5′ | (SEQ ID NO: 543) |
| EGFR-2463 Target: | 5′-TGGATCCCAGAAGGTGAGAAAGTTAAA-3′ | (SEQ ID NO: 899) |
| | 5′-GGAUCCCAGAAGGUGAGAAAGUUAAAA-3′ | (SEQ ID NO: 2324) |
| | 3′-CCUAGGGUCUUCCACUCUUUCAAUUUU-5′ | (SEQ ID NO: 544) |
| EGFR-2464 Target: | 5′-GGATCCCAGAAGGTGAGAAAGTTAAAA-3′ | (SEQ ID NO: 900) |
| | 5′-GAUCCCAGAAGGUGAGAAAGUUAAAAU-3′ | (SEQ ID NO: 2325) |
| | 3′-CUAGGGUCUUCCACUCUUUCAAUUUUA-5′ | (SEQ ID NO: 545) |
| EGFR-2465 Target: | 5′-GATCCCAGAAGGTGAGAAAGTTAAAAT-3′ | (SEQ ID NO: 901) |
| | 5′-CGCAGCAUGUCAAGAUCACAGAUUUUG-3′ | (SEQ ID NO: 2326) |
| | 3′-GCGUCGUACAGUUCUAGUGUCUAAAAC-5′ | (SEQ ID NO: 546) |
| EGFR-2815 Target: | 5′-CGCAGCATGTCAAGATCACAGATTTTG-3′ | (SEQ ID NO: 902) |
| | 5′-GCAGCAUGUCAAGAUCACAGAUUUUGG-3′ | (SEQ ID NO: 2327) |
| | 3′-CGUCGUACAGUUCUAGUGUCUAAAACC-5′ | (SEQ ID NO: 547) |
| EGFR-2816 Target: | 5′-GCAGCATGTCAAGATCACAGATTTTGG-3′ | (SEQ ID NO: 903) |
| | 5′-CAGCAUGUCAAGAUCACAGAUUUUGGG-3′ | (SEQ ID NO: 2328) |
| | 3′-GUCGUACAGUUCUAGUGUCUAAAACCC-5′ | (SEQ ID NO: 548) |
| EGFR-2817 Target: | 5′-CAGCATGTCAAGATCACAGATTTTGGG-3′ | (SEQ ID NO: 904) |
| | 5′-AGCAUGUCAAGAUCACAGAUUUUGGGC-3′ | (SEQ ID NO: 2329) |
| | 3′-UCGUACAGUUCUAGUGUCUAAAACCCG-5′ | (SEQ ID NO: 549) |
| EGFR-2818 Target: | 5′-AGCATGTCAAGATCACAGATTTTGGGC-3′ | (SEQ ID NO: 905) |
| | 5′-GCAUGUCAAGAUCACAGAUUUUGGGCU-3′ | (SEQ ID NO: 2330) |
| | 3′-CGUACAGUUCUAGUGUCUAAAACCCGA-5′ | (SEQ ID NO: 550) |
| EGFR-2819 Target: | 5′-GCATGTCAAGATCACAGATTTTGGGCT-3′ | (SEQ ID NO: 906) |
| | 5′-CAUGUCAAGAUCACAGAUUUUGGGCUG-3′ | (SEQ ID NO: 2331) |
| | 3′-GUACAGUUCUAGUGUCUAAAACCCGAC-5′ | (SEQ ID NO: 551) |
| EGFR-2820 Target: | 5′-CATGTCAAGATCACAGATTTTGGGCTG-3′ | (SEQ ID NO: 907) |
| | 5′-AUGUCAAGAUCACAGAUUUUGGGCUGG-3′ | (SEQ ID NO: 2332) |
| | 3′-UACAGUUCUAGUGUCUAAAACCCGACC-5′ | (SEQ ID NO: 552) |
| EGFR-2821 Target: | 5′-ATGTCAAGATCACAGATTTTGGGCTGG-3′ | (SEQ ID NO: 908) |
| | 5′-UGUCAAGAUCACAGAUUUUGGGCUGGC-3′ | (SEQ ID NO: 2333) |
| | 3′-ACAGUUCUAGUGUCUAAAACCCGACCG-5′ | (SEQ ID NO: 553) |
| EGFR-2822 Target: | 5′-TGTCAAGATCACAGATTTTGGGCTGGC-3′ | (SEQ ID NO: 909) |
| | 5′-GUCAAGAUCACAGAUUUUGGGCUGGCC-3′ | (SEQ ID NO: 2334) |
| | 3′-CAGUUCUAGUGUCUAAAACCCGACCGG-5′ | (SEQ ID NO: 554) |
| EGFR-2823 Target: | 5′-GTCAAGATCACAGATTTTGGGCTGGCC-3′ | (SEQ ID NO: 910) |
| | 5′-UCAAGAUCACAGAUUUUGGGCUGGCCA-3′ | (SEQ ID NO: 2335) |
| | 3′-AGUUCUAGUGUCUAAAACCCGACCGGU-5′ | (SEQ ID NO: 555) |
| EGFR-2824 Target: | 5′-TCAAGATCACAGATTTTGGGCTGGCCA-3′ | (SEQ ID NO: 911) |
| | 5′-CAAGAUCACAGAUUUUGGGCUGGCCAA-3′ | (SEQ ID NO: 2336) |
| | 3′-GUUCUAGUGUCUAAAACCCGACCGGUU-5′ | (SEQ ID NO: 556) |
| EGFR-2825 Target: | 5′-CAAGATCACAGATTTTGGGCTGGCCAA-3′ | (SEQ ID NO: 912) |
| | 5′-AAGAUCACAGAUUUUGGGCUGGCCAAA-3′ | (SEQ ID NO: 2337) |
| | 3′-UUCUAGUGUCUAAAACCCGACCGGUUU-5′ | (SEQ ID NO: 557) |
| EGFR-2826 Target: | 5′-AAGATCACAGATTTTGGGCTGGCCAAA-3′ | (SEQ ID NO: 913) |
| | 5′-AGAUCACAGAUUUUGGGCUGGCCAAAC-3′ | (SEQ ID NO: 2338) |
| | 3′-UCUAGUGUCUAAAACCCGACCGGUUUG-5′ | (SEQ ID NO: 558) |
| EGFR-2827 Target: | 5′-AGATCACAGATTTTGGGCTGGCCAAAC-3′ | (SEQ ID NO: 914) |
| | 5′-GAUCACAGAUUUUGGGCUGGCCAAACU-3′ | (SEQ ID NO: 2339) |
| | 3′-CUAGUGUCUAAAACCCGACCGGUUUGA-5′ | (SEQ ID NO: 559) |
| EGFR-2828 Target: | 5′-GATCACAGATTTTGGGCTGGCCAAACT-3′ | (SEQ ID NO: 915) |
| | 5′-AUCACAGAUUUUGGGCUGGCCAAACUG-3′ | (SEQ ID NO: 2340) |
| | 3′-UAGUGUCUAAAACCCGACCGGUUUGAC-5′ | (SEQ ID NO: 560) |
| EGFR-2829 Target: | 5′-ATCACAGATTTTGGGCTGGCCAAACTG-3′ | (SEQ ID NO: 916) |
| | 5′-UCACAGAUUUUGGGCUGGCCAAACUGC-3′ | (SEQ ID NO: 2341) |
| | 3′-AGUGUCUAAAACCCGACCGGUUUGACG-5′ | (SEQ ID NO: 561) |
| EGFR-2830 Target: | 5′-TCACAGATTTTGGGCTGGCCAAACTGC-3′ | (SEQ ID NO: 917) |
| | 5′-CACAGAUUUUGGGCUGGCCAAACUGCU-3′ | (SEQ ID NO: 2342) |
| | 3′-GUGUCUAAAACCCGACCGGUUUGACGA-5′ | (SEQ ID NO: 562) |
| EGFR-2831 Target: | 5′-CACAGATTTTGGGCTGGCCAAACTGCT-3′ | (SEQ ID NO: 918) |
| | 5′-ACAGAUUUUGGGCUGGCCAAACUGCUG-3′ | (SEQ ID NO: 2343) |
| | 3′-UGUCUAAAACCCGACCGGUUUGACGAC-5′ | (SEQ ID NO: 563) |
| EGFR-2832 Target: | 5′-ACAGATTTTGGGCTGGCCAAACTGCTG-3′ | (SEQ ID NO: 919) |
| | 5′-CAGAUUUUGGGCUGGCCAAACUGCUGG-3′ | (SEQ ID NO: 2344) |
| | 3′-GUCUAAAACCCGACCGGUUUGACGACC-5′ | (SEQ ID NO: 564) |
| EGFR-2833 Target: | 5′-CAGATTTTGGGCTGGCCAAACTGCTGG-3′ | (SEQ ID NO: 920) |
| | 5′-AGAUUUUGGGCUGGCCAAACUGCUGGG-3′ | (SEQ ID NO: 2345) |
| | 3′-UCUAAAACCCGACCGGUUUGACGACCC-5′ | (SEQ ID NO: 565) |
| EGFR-2834 Target: | 5′-AGATTTTGGGCTGGCCAAACTGCTGGG-3′ | (SEQ ID NO: 921) |
| | 5′-GAUUUUGGGCUGGCCAAACUGCUGGGU-3′ | (SEQ ID NO: 2346) |
| | 3′-CUAAAACCCGACCGGUUUGACGACCCA-5′ | (SEQ ID NO: 566) |
| EGFR-2835 Target: | 5′-GATTTTGGGCTGGCCAAACTGCTGGGT-3′ | (SEQ ID NO: 922) |
| | 5′-AUUUUGGGCUGGCCAAACUGCUGGGUG-3′ | (SEQ ID NO: 2347) |
| | 3′-UAAAACCCGACCGGUUUGACGACCCAC-5′ | (SEQ ID NO: 567) |
| EGFR-2836 Target: | 5′-ATTTTGGGCTGGCCAAACTGCTGGGTG-3′ | (SEQ ID NO: 923) |
| | 5′-UUUUGGGCUGGCCAAACUGCUGGGUGC-3′ | (SEQ ID NO: 2348) |
| | 3′-AAAACCCGACCGGUUUGACGACCCACG-5′ | (SEQ ID NO: 568) |
| EGFR-2837 Target: | 5′-TTTTGGGCTGGCCAAACTGCTGGGTGC-3′ | (SEQ ID NO: 924) |
| | 5′-AGGCAAAGUGCCUAUCAAGUGGAUGGC-3′ | (SEQ ID NO: 2349) |
| | 3′-UCCGUUUCACGGAUAGUUCACCUACCG-5′ | (SEQ ID NO: 569) |
| EGFR-2891 Target: | 5′-AGGCAAAGTGCCTATCAAGTGGATGGC-3′ | (SEQ ID NO: 925) |
| | 5′-GGCAAAGUGCCUAUCAAGUGGAUGGCA-3′ | (SEQ ID NO: 2350) |
| | 3′-CCGUUUCACGGAUAGUUCACCUACCGU-5′ | (SEQ ID NO: 570) |
| EGFR-2892 Target: | 5′-GGCAAAGTGCCTATCAAGTGGATGGCA-3′ | (SEQ ID NO: 926) |
| | 5′-GCAAAGUGCCUAUCAAGUGGAUGGCAU-3′ | (SEQ ID NO: 2351) |
| | 3′-CGUUUCACGGAUAGUUCACCUACCGUA-5′ | (SEQ ID NO: 571) |
| EGFR-2893 Target: | 5′-GCAAAGTGCCTATCAAGTGGATGGCAT-3′ | (SEQ ID NO: 927) |
| | 5′-CAAAGUGCCUAUCAAGUGGAUGGCAUU-3′ | (SEQ ID NO: 2352) |
| | 3′-GUUUCACGGAUAGUUCACCUACCGUAA-5′ | (SEQ ID NO: 572) |
| EGFR-2894 Target: | 5′-CAAAGTGCCTATCAAGTGGATGGCATT-3′ | (SEQ ID NO: 928) |
| | 5′-AAAGUGCCUAUCAAGUGGAUGGCAUUG-3′ | (SEQ ID NO: 2353) |
| | 3′-UUUCACGGAUAGUUCACCUACCGUAAC-5′ | (SEQ ID NO: 573) |
| EGFR-2895 Target: | 5′-AAAGTGCCTATCAAGTGGATGGCATTG-3′ | (SEQ ID NO: 929) |
| | 5′-AAGUGCCUAUCAAGUGGAUGGCAUUGG-3′ | (SEQ ID NO: 2354) |
| | 3′-UUCACGGAUAGUUCACCUACCGUAACC-5′ | (SEQ ID NO: 574) |
| EGFR-2896 Target: | 5′-AAGTGCCTATCAAGTGGATGGCATTGG-3′ | (SEQ ID NO: 930) |
| | 5′-AGUGCCUAUCAAGUGGAUGGCAUUGGA-3′ | (SEQ ID NO: 2355) |
| | 3′-UCACGGAUAGUUCACCUACCGUAACCU-5′ | (SEQ ID NO: 575) |
| EGFR-2897 Target: | 5′-AGTGCCTATCAAGTGGATGGCATTGGA-3′ | (SEQ ID NO: 931) |
| | 5′-GUACCAUCGAUGUCUACAUGAUCAUGG-3′ | (SEQ ID NO: 2356) |
| | 3′-CAUGGUAGCUACAGAUGUACUAGUACC-5′ | (SEQ ID NO: 576) |
| EGFR-3088 Target: | 5′-GTACCATCGATGTCTACATGATCATGG-3′ | (SEQ ID NO: 932) |
| | 5′-UACCAUCGAUGUCUACAUGAUCAUGGU-3′ | (SEQ ID NO: 2357) |
| | 3′-AUGGUAGCUACAGAUGUACUAGUACCA-5′ | (SEQ ID NO: 577) |
| EGFR-3089 Target: | 5′-TACCATCGATGTCTACATGATCATGGT-3′ | (SEQ ID NO: 933) |
| | 5′-ACCAUCGAUGUCUACAUGAUCAUGGUC-3′ | (SEQ ID NO: 2358) |
| | 3′-UGGUAGCUACAGAUGUACUAGUACCAG-5′ | (SEQ ID NO: 578) |
| EGFR-3090 Target: | 5′-ACCATCGATGTCTACATGATCATGGTC-3′ | (SEQ ID NO: 934) |
| | 5′-CCAUCGAUGUCUACAUGAUCAUGGUCA-3′ | (SEQ ID NO: 2359) |
| | 3′-GGUAGCUACAGAUGUACUAGUACCAGU-5′ | (SEQ ID NO: 579) |
| EGFR-3091 Target: | 5′-CCATCGATGTCTACATGATCATGGTCA-3′ | (SEQ ID NO: 935) |
| | 5′-CAUCGAUGUCUACAUGAUCAUGGUCAA-3′ | (SEQ ID NO: 2360) |
| | 3′-GUAGCUACAGAUGUACUAGUACCAGUU-5′ | (SEQ ID NO: 580) |
| EGFR-3092 Target: | 5′-CATCGATGTCTACATGATCATGGTCAA-3′ | (SEQ ID NO: 936) |
| | 5′-AUCGAUGUCUACAUGAUCAUGGUCAAG-3′ | (SEQ ID NO: 2361) |
| | 3′-UAGCUACAGAUGUACUAGUACCAGUUC-5′ | (SEQ ID NO: 581) |
| EGFR-3093 Target: | 5′-ATCGATGTCTACATGATCATGGTCAAG-3′ | (SEQ ID NO: 937) |
| | 5′-UCGAUGUCUACAUGAUCAUGGUCAAGU-3′ | (SEQ ID NO: 2362) |
| | 3′-AGCUACAGAUGUACUAGUACCAGUUCA-5′ | (SEQ ID NO: 582) |
| EGFR-3094 Target: | 5′-TCGATGTCTACATGATCATGGTCAAGT-3′ | (SEQ ID NO: 938) |
| | 5′-CGAUGUCUACAUGAUCAUGGUCAAGUG-3′ | (SEQ ID NO: 2363) |
| | 3′-GCUACAGAUGUACUAGUACCAGUUCAC-5′ | (SEQ ID NO: 583) |
| EGFR-3095 Target: | 5′-CGATGTCTACATGATCATGGTCAAGTG-3′ | (SEQ ID NO: 939) |
| | 5′-GAUGUCUACAUGAUCAUGGUCAAGUGC-3′ | (SEQ ID NO: 2364) |
| | 3′-CUACAGAUGUACUAGUACCAGUUCACG-5′ | (SEQ ID NO: 584) |
| EGFR-3096 Target: | 5′-GATGTCTACATGATCATGGTCAAGTGC-3′ | (SEQ ID NO: 940) |
| | 5′-AUGUCUACAUGAUCAUGGUCAAGUGCU-3′ | (SEQ ID NO: 2365) |
| | 3′-UACAGAUGUACUAGUACCAGUUCACGA-5′ | (SEQ ID NO: 585) |
| EGFR-3097 Target: | 5′-ATGTCTACATGATCATGGTCAAGTGCT-3′ | (SEQ ID NO: 941) |
| | 5′-UGUCUACAUGAUCAUGGUCAAGUGCUG-3′ | (SEQ ID NO: 2366) |
| | 3′-ACAGAUGUACUAGUACCAGUUCACGAC-5′ | (SEQ ID NO: 586) |
| EGFR-3098 Target: | 5′-TGTCTACATGATCATGGTCAAGTGCTG-3′ | (SEQ ID NO: 942) |
| | 5′-GUCUACAUGAUCAUGGUCAAGUGCUGG-3′ | (SEQ ID NO: 2367) |
| | 3′-CAGAUGUACUAGUACCAGUUCACGACC-5′ | (SEQ ID NO: 587) |
| EGFR-3099 Target: | 5′-GTCTACATGATCATGGTCAAGTGCTGG-3′ | (SEQ ID NO: 943) |
| | 5′-UCUACAUGAUCAUGGUCAAGUGCUGGA-3′ | (SEQ ID NO: 2368) |
| | 3′-AGAUGUACUAGUACCAGUUCACGACCU-5′ | (SEQ ID NO: 588) |
| EGFR-3100 Target: | 5′-TCTACATGATCATGGTCAAGTGCTGGA-3′ | (SEQ ID NO: 944) |
| | 5′-CUACAUGAUCAUGGUCAAGUGCUGGAU-3′ | (SEQ ID NO: 2369) |
| | 3′-GAUGUACUAGUACCAGUUCACGACCUA-5′ | (SEQ ID NO: 589) |
| EGFR-3101 Target: | 5′-CTACATGATCATGGTCAAGTGCTGGAT-3′ | (SEQ ID NO: 945) |
| | 5′-UACAUGAUCAUGGUCAAGUGCUGGAUG-3′ | (SEQ ID NO: 2370) |
| | 3′-AUGUACUAGUACCAGUUCACGACCUAC-5′ | (SEQ ID NO: 590) |
| EGFR-3102 Target: | 5′-TACATGATCATGGTCAAGTGCTGGATG-3′ | (SEQ ID NO: 946) |
| | 5′-ACAUGAUCAUGGUCAAGUGCUGGAUGA-3′ | (SEQ ID NO: 2371) |
| | 3′-UGUACUAGUACCAGUUCACGACCUACU-5′ | (SEQ ID NO: 591) |
| EGFR-3103 Target: | 5′-ACATGATCATGGTCAAGTGCTGGATGA-3′ | (SEQ ID NO: 947) |
| | 5′-CAUGAUCAUGGUCAAGUGCUGGAUGAU-3′ | (SEQ ID NO: 2372) |
| | 3′-GUACUAGUACCAGUUCACGACCUACUA-5′ | (SEQ ID NO: 592) |
| EGFR-3104 Target: | 5′-CATGATCATGGTCAAGTGCTGGATGAT-3′ | (SEQ ID NO: 948) |
| | 5′-AUGAUCAUGGUCAAGUGCUGGAUGAUA-3′ | (SEQ ID NO: 2373) |
| | 3′-UACUAGUACCAGUUCACGACCUACUAU-5′ | (SEQ ID NO: 593) |
| EGFR-3105 Target: | 5′-ATGATCATGGTCAAGTGCTGGATGATA-3′ | (SEQ ID NO: 949) |
| | 5′-UGAUCAUGGUCAAGUGCUGGAUGAUAG-3′ | (SEQ ID NO: 2374) |
| | 3′-ACUAGUACCAGUUCACGACCUACUAUC-5′ | (SEQ ID NO: 594) |
| EGFR-3106 Target: | 5′-TGATCATGGTCAAGTGCTGGATGATAG-3′ | (SEQ ID NO: 950) |
| | 5′-GAUCAUGGUCAAGUGCUGGAUGAUAGA-3′ | (SEQ ID NO: 2375) |
| | 3′-CUAGUACCAGUUCACGACCUACUAUCU-5′ | (SEQ ID NO: 595) |
| EGFR-3107 Target: | 5′-GATCATGGTCAAGTGCTGGATGATAGA-3′ | (SEQ ID NO: 951) |
| | 5′-AUCAUGGUCAAGUGCUGGAUGAUAGAC-3′ | (SEQ ID NO: 2376) |
| | 3′-UAGUACCAGUUCACGACCUACUAUCUG-5′ | (SEQ ID NO: 596) |
| EGFR-3108 Target: | 5′-ATCATGGTCAAGTGCTGGATGATAGAC-3′ | (SEQ ID NO: 952) |
| | 5′-UCAUGGUCAAGUGCUGGAUGAUAGACG-3′ | (SEQ ID NO: 2377) |
| | 3′-AGUACCAGUUCACGACCUACUAUCUGC-5′ | (SEQ ID NO: 597) |
| EGFR-3109 Target: | 5′-TCATGGTCAAGTGCTGGATGATAGACG-3′ | (SEQ ID NO: 953) |
| | 5′-CAUGGUCAAGUGCUGGAUGAUAGACGC-3′ | (SEQ ID NO: 2378) |
| | 3′-GUACCAGUUCACGACCUACUAUCUGCG-5′ | (SEQ ID NO: 598) |
| EGFR-3110 Target: | 5′-CATGGTCAAGTGCTGGATGATAGACGC-3′ | (SEQ ID NO: 954) |
| | 5′-AUGGUCAAGUGCUGGAUGAUAGACGCA-3′ | (SEQ ID NO: 2379) |
| | 3′-UACCAGUUCACGACCUACUAUCUGCGU-5′ | (SEQ ID NO: 599) |
| EGFR-3111 Target: | 5′-ATGGTCAAGTGCTGGATGATAGACGCA-3′ | (SEQ ID NO: 955) |
| | 5′-UGGUCAAGUGCUGGAUGAUAGACGCAG-3′ | (SEQ ID NO: 2380) |
| | 3′-ACCAGUUCACGACCUACUAUCUGCGUC-5′ | (SEQ ID NO: 600) |
| EGFR-3112 Target: | 5′-TGGTCAAGTGCTGGATGATAGACGCAG-3′ | (SEQ ID NO: 956) |
| | 5′-GGUCAAGUGCUGGAUGAUAGACGCAGA-3′ | (SEQ ID NO: 2381) |
| | 3′-CCAGUUCACGACCUACUAUCUGCGUCU-5′ | (SEQ ID NO: 601) |
| EGFR-3113 Target: | 5′-GGTCAAGTGCTGGATGATAGACGCAGA-3′ | (SEQ ID NO: 957) |
| | 5′-UCGAAUUCUCCAAAAUGGCCCGAGACC-3′ | (SEQ ID NO: 2382) |
| | 3′-AGCUUAAGAGGUUUUACCGGGCUCUGG-5′ | (SEQ ID NO: 602) |
| EGFR-3169 Target: | 5′-TCGAATTCTCCAAAATGGCCCGAGACC-3′ | (SEQ ID NO: 958) |
| | 5′-CGAAUUCUCCAAAAUGGCCCGAGACCC-3′ | (SEQ ID NO: 2383) |
| | 3′-GCUUAAGAGGUUUUACCGGGCUCUGGG-5′ | (SEQ ID NO: 603) |
| EGFR-3170 Target: | 5′-CGAATTCTCCAAAATGGCCCGAGACCC-3′ | (SEQ ID NO: 959) |
| | 5′-GGGAUGAAAGAAUGCAUUUGCCAAGUC-3′ | (SEQ ID NO: 2384) |
| | 3′-CCCUACUUUCUUACGUAAACGGUUCAG-5′ | (SEQ ID NO: 604) |
| EGFR-3220 Target: | 5′-GGGATGAAAGAATGCATTTGCCAAGTC-3′ | (SEQ ID NO: 960) |
| | 5′-GGAUGAAAGAAUGCAUUUGCCAAGUCC-3′ | (SEQ ID NO: 2385) |
| | 3′-CCUACUUUCUUACGUAAACGGUUCAGG-5′ | (SEQ ID NO: 605) |
| EGFR-3221 Target: | 5′-GGATGAAAGAATGCATTTGCCAAGTCC-3′ | (SEQ ID NO: 961) |
| | 5′-GAUGAAAGAAUGCAUUUGCCAAGUCCU-3′ | (SEQ ID NO: 2386) |
| | 3′-CUACUUUCUUACGUAAACGGUUCAGGA-5′ | (SEQ ID NO: 606) |
| EGFR-3222 Target: | 5′-GATGAAAGAATGCATTTGCCAAGTCCT-3′ | (SEQ ID NO: 962) |
| | 5′-AUGAAAGAAUGCAUUUGCCAAGUCCUA-3′ | (SEQ ID NO: 2387) |
| | 3′-UACUUUCUUACGUAAACGGUUCAGGAU-5′ | (SEQ ID NO: 607) |
| EGFR-3223 Target: | 5′-ATGAAAGAATGCATTTGCCAAGTCCTA-3′ | (SEQ ID NO: 963) |
| | 5′-UGAAAGAAUGCAUUUGCCAAGUCCUAC-3′ | (SEQ ID NO: 2388) |
| | 3′-ACUUUCUUACGUAAACGGUUCAGGAUG-5′ | (SEQ ID NO: 608) |
| EGFR-3224 Target: | 5′-TGAAAGAATGCATTTGCCAAGTCCTAC-3′ | (SEQ ID NO: 964) |
| | 5′-UGGACAACCCUGACUACCAGCAGGACU-3′ | (SEQ ID NO: 2389) |
| | 3′-ACCUGUUGGGACUGAUGGUCGUCCUGA-5′ | (SEQ ID NO: 609) |
| EGFR-3772 Target: | 5′-TGGACAACCCTGACTACCAGCAGGACT-3′ | (SEQ ID NO: 965) |
| | 5′-GGACAACCCUGACUACCAGCAGGACUU-3′ | (SEQ ID NO: 2390) |
| | 3′-CCUGUUGGGACUGAUGGUCGUCCUGAA-5′ | (SEQ ID NO: 610) |
| EGFR-3773 Target: | 5′-GGACAACCCTGACTACCAGCAGGACTT-3′ | (SEQ ID NO: 966) |
| | 5′-GACAACCCUGACUACCAGCAGGACUUC-3′ | (SEQ ID NO: 2391) |
| | 3′-CUGUUGGGACUGAUGGUCGUCCUGAAG-5′ | (SEQ ID NO: 611) |
| EGFR-3774 Target: | 5′-GACAACCCTGACTACCAGCAGGACTTC-3′ | (SEQ ID NO: 967) |
| | 5′-ACAACCCUGACUACCAGCAGGACUUCU-3′ | (SEQ ID NO: 2392) |
| | 3′-UGUUGGGACUGAUGGUCGUCCUGAAGA-5′ | (SEQ ID NO: 612) |
| EGFR-3775 Target: | 5′-ACAACCCTGACTACCAGCAGGACTTCT-3′ | (SEQ ID NO: 968) |
| | 5′-CAACCCUGACUACCAGCAGGACUUCUU-3′ | (SEQ ID NO: 2393) |
| | 3′-GUUGGGACUGAUGGUCGUCCUGAAGAA-5′ | (SEQ ID NO: 613) |
| EGFR-3776 Target: | 5′-CAACCCTGACTACCAGCAGGACTTCTT-3′ | (SEQ ID NO: 969) |
| | 5′-AACCCUGACUACCAGCAGGACUUCUUU-3′ | (SEQ ID NO: 2394) |
| | 3′-UUGGGACUGAUGGUCGUCCUGAAGAAA-5′ | (SEQ ID NO: 614) |
| EGFR-3777 Target: | 5′-AACCCTGACTACCAGCAGGACTTCTTT-3′ | (SEQ ID NO: 970) |
| | 5′-ACCCUGACUACCAGCAGGACUUCUUUC-3′ | (SEQ ID NO: 2395) |
| | 3′-UGGGACUGAUGGUCGUCCUGAAGAAAG-5′ | (SEQ ID NO: 615) |
| EGFR-3778 Target: | 5′-ACCCTGACTACCAGCAGGACTTCTTTC-3′ | (SEQ ID NO: 971) |
| | 5′-CCCUGACUACCAGCAGGACUUCUUUCC-3′ | (SEQ ID NO: 2396) |
| | 3′-GGGACUGAUGGUCGUCCUGAAGAAAGG-5′ | (SEQ ID NO: 616) |
| EGFR-3779 Target: | 5′-CCCTGACTACCAGCAGGACTTCTTTCC-3′ | (SEQ ID NO: 972) |

TABLE 10
Selected Mouse Anti-EGFR “Blunt/Blunt” DsiRNAs

| | | |
|---|---|---|
| | 5′-CAGCGCAACGCGCAGCAGCCUCCCUCC-3′ | (SEQ ID NO: 2397) |
| | 3′-GUCGCGUUGCGCGUCGUCGGAGGGAGG-5′ | (SEQ ID NO: 617) |
| EGFR-m71 Target: | 5′-CAGCGCAACGCGCAGCAGCCTCCCTCC-3′ | (SEQ ID NO: 973) |
| | 5′-ACGCGCAGCAGCCUCCCUCCUCUUCUU-3′ | (SEQ ID NO: 2398) |
| | 3′-UGCGCGUCGUCGGAGGGAGGAGAAGAA-5′ | (SEQ ID NO: 618) |
| EGFR-m78 Target: | 5′-ACGCGCAGCAGCCTCCCTCCTCTTCTT-3′ | (SEQ ID NO: 974) |
| | 5′-AGCCUCCCUCCUCUUCUUCCCGCACUG-3′ | (SEQ ID NO: 2399) |
| | 3′-UCGGAGGGAGGAGAAGAAGGGCGUGAC-5′ | (SEQ ID NO: 619) |
| EGFR-m87 Target: | 5′-AGCCTCCCTCCTCTTCTTCCCGCACTG-3′ | (SEQ ID NO: 975) |
| | 5′-CUCCCUCCUCUUCUUCCCGCACUGUGC-3′ | (SEQ ID NO: 2400) |
| | 3′-GAGGGAGGAGAAGAAGGGCGUGACACG-5′ | (SEQ ID NO: 620) |
| EGFR-m90 Target: | 5′-CTCCCTCCTCTTCTTCCCGCACTGTGC-3′ | (SEQ ID NO: 976) |
| | 5′-CCCUCCUCUUCUUCCCGCACUGUGCGC-3′ | (SEQ ID NO: 2401) |
| | 3′-GGGAGGAGAAGAAGGGCGUGACACGCG-5′ | (SEQ ID NO: 621) |
| EGFR-m92 Target: | 5′-CCCTCCTCTTCTTCCCGCACTGTGCGC-3′ | (SEQ ID NO: 977) |
| | 5′-CUCCUCUUCUUCCCGCACUGUGCGCUC-3′ | (SEQ ID NO: 2402) |
| | 3′-GAGGAGAAGAAGGGCGUGACACGCGAG-5′ | (SEQ ID NO: 622) |
| EGFR-m94 Target: | 5′-CTCCTCTTCTTCCCGCACTGTGCGCTC-3′ | (SEQ ID NO: 978) |
| | 5′-CUCUUCUUCCCGCACUGUGCGCUCCUC-3′ | (SEQ ID NO: 2403) |
| | 3′-GAGAAGAAGGGCGUGACACGCGAGGAG-5′ | (SEQ ID NO: 623) |
| EGFR-m97 Target: | 5′-CTCTTCTTCCCGCACTGTGCGCTCCTC-3′ | (SEQ ID NO: 979) |
| | 5′-CUUCUUCCCGCACUGUGCGCUCCUCCU-3′ | (SEQ ID NO: 2404) |
| | 3′-GAAGAAGGGCGUGACACGCGAGGAGGA-5′ | (SEQ ID NO: 624) |
| EGFR-m99 Target: | 5′-CTTCTTCCCGCACTGTGCGCTCCTCCT-3′ | (SEQ ID NO: 980) |
| | 5′-UUCUUCCCGCACUGUGCGCUCCUCCUG-3′ | (SEQ ID NO: 2405) |
| | 3′-AAGAAGGGCGUGACACGCGAGGAGGAC-5′ | (SEQ ID NO: 625) |
| EGFR-m100 Target: | 5′-TTCTTCCCGCACTGTGCGCTCCTCCTG-3′ | (SEQ ID NO: 981) |
| | 5′-UCUUCCCGCACUGUGCGCUCCUCCUGG-3′ | (SEQ ID NO: 2406) |
| | 3′-AGAAGGGCGUGACACGCGAGGAGGACC-5′ | (SEQ ID NO: 626) |
| EGFR-m101 Target: | 5′-TCTTCCCGCACTGTGCGCTCCTCCTGG-3′ | (SEQ ID NO: 982) |
| | 5′-CUGUGCGCUCCUCCUGGGCUAGGGCGU-3′ | (SEQ ID NO: 2407) |
| | 3′-GACACGCGAGGAGGACCCGAUCCCGCA-5′ | (SEQ ID NO: 627) |
| EGFR-m111 Target: | 5′-CTGTGCGCTCCTCCTGGGCTAGGGCGT-3′ | (SEQ ID NO: 983) |
| | 5′-UGCGCUCCUCCUGGGCUAGGGCGUCUG-3′ | (SEQ ID NO: 2408) |
| | 3′-ACGCGAGGAGGACCCGAUCCCGCAGAC-5′ | (SEQ ID NO: 628) |
| EGFR-m114 Target: | 5′-TGCGCTCCTCCTGGGCTAGGGCGTCTG-3′ | (SEQ ID NO: 984) |
| | 5′-CACACUGCUGGUGUUGCUGACCGCGCU-3′ | (SEQ ID NO: 2409) |
| | 3′-GUGUGACGACCACAACGACUGGCGCGA-5′ | (SEQ ID NO: 629) |
| EGFR-m333 Target: | 5′-CACACTGCTGGTGTTGCTGACCGCGCT-3′ | (SEQ ID NO: 985) |
| | 5′-ACACUGCUGGUGUUGCUGACCGCGCUC-3′ | (SEQ ID NO: 2410) |
| | 3′-UGUGACGACCACAACGACUGGCGCGAG-5′ | (SEQ ID NO: 630) |
| EGFR-m334 Target: | 5′-ACACTGCTGGTGTTGCTGACCGCGCTC-3′ | (SEQ ID NO: 986) |
| | 5′-CACUGCUGGUGUUGCUGACCGCGCUCU-3′ | (SEQ ID NO: 2411) |
| | 3′-GUGACGACCACAACGACUGGCGCGAGA-5′ | (SEQ ID NO: 631) |
| EGFR-m335 Target: | 5′-CACTGCTGGTGTTGCTGACCGCGCTCT-3′ | (SEQ ID NO: 987) |
| | 5′-ACUGCUGGUGUUGCUGACCGCGCUCUG-3′ | (SEQ ID NO: 2412) |
| | 3′-UGACGACCACAACGACUGGCGCGAGAC-5′ | (SEQ ID NO: 632) |
| EGFR-m336 Target: | 5′-ACTGCTGGTGTTGCTGACCGCGCTCTG-3′ | (SEQ ID NO: 988) |
| | 5′-CUGCUGGUGUUGCUGACCGCGCUCUGC-3′ | (SEQ ID NO: 2413) |
| | 3′-GACGACCACAACGACUGGCGCGAGACG-5′ | (SEQ ID NO: 633) |
| EGFR-m337 Target: | 5′-CTGCTGGTGTTGCTGACCGCGCTCTGC-3′ | (SEQ ID NO: 989) |
| | 5′-UGCUGGUGUUGCUGACCGCGCUCUGCG-3′ | (SEQ ID NO: 2414) |
| | 3′-ACGACCACAACGACUGGCGCGAGACGC-5′ | (SEQ ID NO: 634) |
| EGFR-m338 Target: | 5′-TGCTGGTGTTGCTGACCGCGCTCTGCG-3′ | (SEQ ID NO: 990) |
| | 5′-GCUGGUGUUGCUGACCGCGCUCUGCGC-3′ | (SEQ ID NO: 2415) |
| | 3′-CGACCACAACGACUGGCGCGAGACGCG-5′ | (SEQ ID NO: 635) |
| EGFR-m339 Target: | 5′-GCTGGTGTTGCTGACCGCGCTCTGCGC-3′ | (SEQ ID NO: 991) |
| | 5′-UGGUGUUGCUGACCGCGCUCUGCGCCG-3′ | (SEQ ID NO: 2416) |
| | 3′-ACCACAACGACUGGCGCGAGACGCGGC-5′ | (SEQ ID NO: 636) |
| EGFR-m341 Target: | 5′-TGGTGTTGCTGACCGCGCTCTGCGCCG-3′ | (SEQ ID NO: 992) |
| | 5′-GGUGUUGCUGACCGCGCUCUGCGCCGC-3′ | (SEQ ID NO: 2417) |
| | 3′-CCACAACGACUGGCGCGAGACGCGGCG-5′ | (SEQ ID NO: 637) |
| EGFR-m342 Target: | 5′-GGTGTTGCTGACCGCGCTCTGCGCCGC-3′ | (SEQ ID NO: 993) |
| | 5′-GUGUUGCUGACCGCGCUCUGCGCCGCA-3′ | (SEQ ID NO: 2418) |
| | 3′-CACAACGACUGGCGCGAGACGCGGCGU-5′ | (SEQ ID NO: 638) |
| EGFR-m343 Target: | 5′-GTGTTGCTGACCGCGCTCTGCGCCGCA-3′ | (SEQ ID NO: 994) |
| | 5′-UGUUGCUGACCGCGCUCUGCGCCGCAG-3′ | (SEQ ID NO: 2419) |
| | 3′-ACAACGACUGGCGCGAGACGCGGCGUC-5′ | (SEQ ID NO: 639) |
| EGFR-m344 Target: | 5′-TGTTGCTGACCGCGCTCTGCGCCGCAG-3′ | (SEQ ID NO: 995) |
| | 5′-UGCUGACCGCGCUCUGCGCCGCAGGUG-3′ | (SEQ ID NO: 2420) |
| | 3′-ACGACUGGCGCGAGACGCGGCGUCCAC-5′ | (SEQ ID NO: 640) |
| EGFR-m347 Target: | 5′-TGCTGACCGCGCTCTGCGCCGCAGGTG-3′ | (SEQ ID NO: 996) |
| | 5′-GCUGACCGCGCUCUGCGCCGCAGGUGG-3′ | (SEQ ID NO: 2421) |
| | 3′-CGACUGGCGCGAGACGCGGCGUCCACC-5′ | (SEQ ID NO: 641) |
| EGFR-m348 Target: | 5′-GCTGACCGCGCTCTGCGCCGCAGGTGG-3′ | (SEQ ID NO: 997) |
| | 5′-UCCUGAUUGGUGCUGUGCGAUUCAGCA-3′ | (SEQ ID NO: 2422) |
| | 3′-AGGACUAACCACGACACGCUAAGUCGU-5′ | (SEQ ID NO: 642) |
| EGFR-m734 Target: | 5′-TCCTGATTGGTGCTGTGCGATTCAGCA-3′ | (SEQ ID NO: 998) |
| | 5′-CCUGAUUGGUGCUGUGCGAUUCAGCAA-3′ | (SEQ ID NO: 2423) |
| | 3′-GGACUAACCACGACACGCUAAGUCGUU-5′ | (SEQ ID NO: 643) |
| EGFR-m735 Target: | 5′-CCTGATTGGTGCTGTGCGATTCAGCAA-3′ | (SEQ ID NO: 999) |
| | 5′-CUGAUUGGUGCUGUGCGAUUCAGCAAC-3′ | (SEQ ID NO: 2424) |
| | 3′-GACUAACCACGACACGCUAAGUCGUUG-5′ | (SEQ ID NO: 644) |
| EGFR-m736 Target: | 5′-CTGATTGGTGCTGTGCGATTCAGCAAC-3′ | (SEQ ID NO: 1000) |
| | 5′-GAUUGGUGCUGUGCGAUUCAGCAACAA-3′ | (SEQ ID NO: 2425) |
| | 3′-CUAACCACGACACGCUAAGUCGUUGUU-5′ | (SEQ ID NO: 645) |
| EGFR-m738 Target: | 5′-GATTGGTGCTGTGCGATTCAGCAACAA-3′ | (SEQ ID NO: 1001) |
| | 5′-UUGGUGCUGUGCGAUUCAGCAACAACC-3′ | (SEQ ID NO: 2426) |
| | 3′-AACCACGACACGCUAAGUCGUUGUUGG-5′ | (SEQ ID NO: 646) |
| EGFR-m740 Target: | 5′-TTGGTGCTGTGCGATTCAGCAACAACC-3′ | (SEQ ID NO: 1002) |
| | 5′-UGGUGCUGUGCGAUUCAGCAACAACCC-3′ | (SEQ ID NO: 2427) |
| | 3′-ACCACGACACGCUAAGUCGUUGUUGGG-5′ | (SEQ ID NO: 647) |
| EGFR-m741 Target: | 5′-TGGTGCTGTGCGATTCAGCAACAACCC-3′ | (SEQ ID NO: 1003) |
| | 5′-UCCAAGCUGUCCCAAUGGAAGCUGCUG-3′ | (SEQ ID NO: 2428) |
| | 3′-AGGUUCGACAGGGUUACCUUCGACGAC-5′ | (SEQ ID NO: 648) |
| EGFR-m879 Target: | 5′-TCCAAGCTGTCCCAATGGAAGCTGCTG-3′ | (SEQ ID NO: 1004) |
| | 5′-CUGUGCCCAGCAAUGUUCCCAUCGCUG-3′ | (SEQ ID NO: 2429) |
| | 3′-GACACGGGUCGUUACAAGGGUAGCGAC-5′ | (SEQ ID NO: 649) |
| EGFR-m948 Target: | 5′-CTGTGCCCAGCAATGTTCCCATCGCTG-3′ | (SEQ ID NO: 1005) |
| | 5′-GGAAGUACAGCUUUGGUGCCACCUGUG-3′ | (SEQ ID NO: 2430) |
| | 3′-CCUUCAUGUCGAAACCACGGUGGACAC-5′ | (SEQ ID NO: 650) |
| EGFR-m1154 Target: | 5′-GGAAGTACAGCTTTGGTGCCACCTGTG-3′ | (SEQ ID NO: 1006) |
| | 5′-CUGUCGCAAAGUUUGUAAUGGCAUAGG-3′ | (SEQ ID NO: 2431) |
| | 3′-GACAGCGUUUCAAACAUUACCGUAUCC-5′ | (SEQ ID NO: 651) |
| EGFR-m1302 Target: | 5′-CTGTCGCAAAGTTTGTAATGGCATAGG-3′ | (SEQ ID NO: 1007) |
| | 5′-GGGAUUCUUUCACGCGCACUCCUCCUC-3′ | (SEQ ID NO: 2432) |
| | 3′-CCCUAAGAAAGUGCGCGUGAGGAGGAG-5′ | (SEQ ID NO: 652) |
| EGFR-m1439 Target: | 5′-GGGATTCTTTCACGCGCACTCCTCCTC-3′ | (SEQ ID NO: 1008) |
| | 5′-AACAGGCUUUUUGCUGAUUCAGGCUUG-3′ | (SEQ ID NO: 2433) |
| | 3′-UUGUCCGAAAAACGACUAAGUCCGAAC-5′ | (SEQ ID NO: 653) |
| EGFR-m1509 Target: | 5′-AACAGGCTTTTTGCTGATTCAGGCTTG-3′ | (SEQ ID NO: 1009) |
| | 5′-UUCAGGCUUGGCCUGAUAACUGGACUG-3′ | (SEQ ID NO: 2434) |
| | 3′-AAGUCCGAACCGGACUAUUGACCUGAC-5′ | (SEQ ID NO: 654) |
| EGFR-m1526 Target: | 5′-TTCAGGCTTGGCCTGATAACTGGACTG-3′ | (SEQ ID NO: 1010) |
| | 5′-CAGGCUUGGCCUGAUAACUGGACUGAC-3′ | (SEQ ID NO: 2435) |
| | 3′-GUCCGAACCGGACUAUUGACCUGACUG-5′ | (SEQ ID NO: 655) |
| EGFR-m1528 Target: | 5′-CAGGCTTGGCCTGATAACTGGACTGAC-3′ | (SEQ ID NO: 1011) |
| | 5′-GCUUGGCCUGAUAACUGGACUGACCUC-3′ | (SEQ ID NO: 2436) |
| | 3′-CGAACCGGACUAUUGACCUGACUGGAG-5′ | (SEQ ID NO: 656) |
| EGFR-m1531 Target: | 5′-GCTTGGCCTGATAACTGGACTGACCTC-3′ | (SEQ ID NO: 1012) |
| | 5′-ACGCCAACUGUACCUAUGGAUGUGCUG-3′ | (SEQ ID NO: 2437) |
| | 3′-UGCGGUUGACAUGGAUACCUACACGAC-5′ | (SEQ ID NO: 657) |
| EGFR-m2168 Target: | 5′-ACGCCAACTGTACCTATGGATGTGCTG-3′ | (SEQ ID NO: 1013) |
| | 5′-CACUGGGAUUGUGGGUGGCCUCCUCUU-3′ | (SEQ ID NO: 2438) |
| | 3′-GUGACCCUAACACCCACCGGAGGAGAA-5′ | (SEQ ID NO: 658) |
| EGFR-m2253 Target: | 5′-CACTGGGATTGTGGGTGGCCTCCTCTT-3′ | (SEQ ID NO: 1014) |
| | 5′-GGUGGUGGCCCUUGGGAUUGGCCUAUU-3′ | (SEQ ID NO: 2439) |
| | 3′-CCACCACCGGGAACCCUAACCGGAUAA-5′ | (SEQ ID NO: 659) |
| EGFR-m2286 Target: | 5′-GGTGGTGGCCCTTGGGATTGGCCTATT-3′ | (SEQ ID NO: 1015) |
| | 5′-GAUUGGCCUAUUCAUGCGAAGACGUCA-3′ | (SEQ ID NO: 2440) |
| | 3′-CUAACCGGAUAAGUACGCUUCUGCAGU-5′ | (SEQ ID NO: 660) |
| EGFR-m2301 Target: | 5′-GATTGGCCTATTCATGCGAAGACGTCA-3′ | (SEQ ID NO: 1016) |
| | 5′-CGCCGCCUGCUUCAAGAGAGAGAGCUC-3′ | (SEQ ID NO: 2441) |
| | 3′-GCGGCGGACGAAGUUCUCUCUCUCGAG-5′ | (SEQ ID NO: 661) |
| EGFR-m2350 Target: | 5′-CGCCGCCTGCTTCAAGAGAGAGAGCTC-3′ | (SEQ ID NO: 1017) |
| | 5′-GCCGCCUGCUUCAAGAGAGAGAGCUCG-3′ | (SEQ ID NO: 2442) |
| | 3′-CGGCGGACGAAGUUCUCUCUCUCGAGC-5′ | (SEQ ID NO: 662) |
| EGFR-m2351 Target: | 5′-GCCGCCTGCTTCAAGAGAGAGAGCTCG-3′ | (SEQ ID NO: 1018) |
| | 5′-CCGCCUGCUUCAAGAGAGAGAGCUCGU-3′ | (SEQ ID NO: 2443) |
| | 3′-GGCGGACGAAGUUCUCUCUCUCGAGCA-5′ | (SEQ ID NO: 663) |
| EGFR-m2352 Target: | 5′-CCGCCTGCTTCAAGAGAGAGAGCTCGT-3′ | (SEQ ID NO: 1019) |
| | 5′-GUGGACAACCCUCAUGUAUGCCGCCUC-3′ | (SEQ ID NO: 2444) |
| | 3′-CACCUGUUGGGAGUACAUACGGCGGAG-5′ | (SEQ ID NO: 664) |
| EGFR-m2617 Target: | 5′-GTGGACAACCCTCATGTATGCCGCCTC-3′ | (SEQ ID NO: 1020) |
| | 5′-UGUAUGCCGCCUCCUGGGCAUCUGUCU-3′ | (SEQ ID NO: 2445) |
| | 3′-ACAUACGGCGGAGGACCCGUAGACAGA-5′ | (SEQ ID NO: 665) |
| EGFR-m2631 Target: | 5′-TGTATGCCGCCTCCTGGGCATCTGTCT-3′ | (SEQ ID NO: 1021) |
| | 5′-CAGCUCAUGCCCUACGGUUGCCUCCUG-3′ | (SEQ ID NO: 2446) |
| | 3′-GUCGAGUACGGGAUGCCAACGGAGGAC-5′ | (SEQ ID NO: 666) |
| EGFR-m2683 Target: | 5′-CAGCTCATGCCCTACGGTTGCCTCCTG-3′ | (SEQ ID NO: 1022) |
| | 5′-AGCUCAUGCCCUACGGUUGCCUCCUGG-3′ | (SEQ ID NO: 2447) |
| | 3′-UCGAGUACGGGAUGCCAACGGAGGACC-5′ | (SEQ ID NO: 667) |
| EGFR-m2684 Target: | 5′-AGCTCATGCCCTACGGTTGCCTCCTGG-3′ | (SEQ ID NO: 1023) |
| | 5′-GAUCGGCGUUUGGUGCACCGUGACUUG-3′ | (SEQ ID NO: 2448) |
| | 3′-CUAGCCGCAAACCACGUGGCACUGAAC-5′ | (SEQ ID NO: 668) |
| EGFR-m2800 Target: | 5′-GATCGGCGTTTGGTGCACCGTGACTTG-3′ | (SEQ ID NO: 1024) |
| | 5′-GCGUUUGGUGCACCGUGACUUGGCAGC-3′ | (SEQ ID NO: 2449) |
| | 3′-CGCAAACCACGUGGCACUGAACCGUCG-5′ | (SEQ ID NO: 669) |
| EGFR-m2805 Target: | 5′-GCGTTTGGTGCACCGTGACTTGGCAGC-3′ | (SEQ ID NO: 1025) |
| | 5′-UUGGGCUGGCCAAACUGCUUGGUGCUG-3′ | (SEQ ID NO: 2450) |
| | 3′-AACCCGACCGGUUUGACGAACCACGAC-5′ | (SEQ ID NO: 670) |
| EGFR-m2879 Target: | 5′-TTGGGCTGGCCAAACTGCTTGGTGCTG-3′ | (SEQ ID NO: 1026) |
| | 5′-UGGGCUGGCCAAACUGCUUGGUGCUGA-3′ | (SEQ ID NO: 2451) |
| | 3′-ACCCGACCGGUUUGACGAACCACGACU-5′ | (SEQ ID NO: 671) |
| EGFR-m2880 Target: | 5′-TGGGCTGGCCAAACTGCTTGGTGCTGA-3′ | (SEQ ID NO: 1027) |
| | 5′-GGCUGGCCAAACUGCUUGGUGCUGAAG-3′ | (SEQ ID NO: 2452) |
| | 3′-CCGACCGGUUUGACGAACCACGACUUC-5′ | (SEQ ID NO: 672) |
| EGFR-m2882 Target: | 5′-GGCTGGCCAAACTGCTTGGTGCTGAAG-3′ | (SEQ ID NO: 1028) |
| | 5′-GCUGGCCAAACUGCUUGGUGCUGAAGA-3′ | (SEQ ID NO: 2453) |
| | 3′-CGACCGGUUUGACGAACCACGACUUCU-5′ | (SEQ ID NO: 673) |
| EGFR-m2883 Target: | 5′-GCTGGCCAAACTGCTTGGTGCTGAAGA-3′ | (SEQ ID NO: 1029) |
| | 5′-GUCAAGUGCUGGAUGAUAGAUGCUGAU-3′ | (SEQ ID NO: 2454) |
| | 3′-CAGUUCACGACCUACUAUCUACGACUA-5′ | (SEQ ID NO: 674) |
| EGFR-m3154 Target: | 5′-GTCAAGTGCTGGATGATAGATGCTGAT-3′ | (SEQ ID NO: 1030) |
| | 5′-UCAAGUGCUGGAUGAUAGAUGCUGAUA-3′ | (SEQ ID NO: 2455) |
| | 3′-AGUUCACGACCUACUAUCUACGACUAU-5′ | (SEQ ID NO: 675) |
| EGFR-m3155 Target: | 5′-TCAAGTGCTGGATGATAGATGCTGATA-3′ | (SEQ ID NO: 1031) |
| | 5′-CAAGUGCUGGAUGAUAGAUGCUGAUAG-3′ | (SEQ ID NO: 2456) |
| | 3′-GUUCACGACCUACUAUCUACGACUAUC-5′ | (SEQ ID NO: 676) |
| EGFR-m3156 Target: | 5′-CAAGTGCTGGATGATAGATGCTGATAG-3′ | (SEQ ID NO: 1032) |
| | 5′-AAGUGCUGGAUGAUAGAUGCUGAUAGC-3′ | (SEQ ID NO: 2457) |
| | 3′-UUCACGACCUACUAUCUACGACUAUCG-5′ | (SEQ ID NO: 677) |
| EGFR-m3157 Target: | 5′-AAGTGCTGGATGATAGATGCTGATAGC-3′ | (SEQ ID NO: 1033) |
| | 5′-AGUGCUGGAUGAUAGAUGCUGAUAGCC-3′ | (SEQ ID NO: 2458) |
| | 3′-UCACGACCUACUAUCUACGACUAUCGG-5′ | (SEQ ID NO: 678) |
| EGFR-m3158 Target: | 5′-AGTGCTGGATGATAGATGCTGATAGCC-3′ | (SEQ ID NO: 1034) |
| | 5′-GUGCUGGAUGAUAGAUGCUGAUAGCCG-3′ | (SEQ ID NO: 2459) |
| | 3′-CACGACCUACUAUCUACGACUAUCGGC-5′ | (SEQ ID NO: 679) |
| EGFR-m3159 Target: | 5′-GTGCTGGATGATAGATGCTGATAGCCG-3′ | (SEQ ID NO: 1035) |
| | 5′-UGCUGGAUGAUAGAUGCUGAUAGCCGC-3′ | (SEQ ID NO: 2460) |
| | 3′-ACGACCUACUAUCUACGACUAUCGGCG-5′ | (SEQ ID NO: 680) |
| EGFR-m3160 Target: | 5′-TGCTGGATGATAGATGCTGATAGCCGC-3′ | (SEQ ID NO: 1036) |
| | 5′-GCUGGAUGAUAGAUGCUGAUAGCCGCC-3′ | (SEQ ID NO: 2461) |
| | 3′-CGACCUACUAUCUACGACUAUCGGCGG-5′ | (SEQ ID NO: 681) |
| EGFR-m3161 Target: | 5′-GCTGGATGATAGATGCTGATAGCCGCC-3′ | (SEQ ID NO: 1037) |
| | 5′-CUGGAUGAUAGAUGCUGAUAGCCGCCC-3′ | (SEQ ID NO: 2462) |
| | 3′-GACCUACUAUCUACGACUAUCGGCGGG-5′ | (SEQ ID NO: 682) |
| EGFR-m3162 Target: | 5′-CTGGATGATAGATGCTGATAGCCGCCC-3′ | (SEQ ID NO: 1038) |
| | 5′-UGGAUGAUAGAUGCUGAUAGCCGCCCA-3′ | (SEQ ID NO: 2463) |
| | 3′-ACCUACUAUCUACGACUAUCGGCGGGU-5′ | (SEQ ID NO: 683) |
| EGFR-m3163 Target: | 5′-TGGATGATAGATGCTGATAGCCGCCCA-3′ | (SEQ ID NO: 1039) |
| | 5′-AUGAUAGAUGCUGAUAGCCGCCCAAAG-3′ | (SEQ ID NO: 2464) |
| | 3′-UACUAUCUACGACUAUCGGCGGGUUUC-5′ | (SEQ ID NO: 684) |
| EGFR-m3166 Target: | 5′-ATGATAGATGCTGATAGCCGCCCAAAG-3′ | (SEQ ID NO: 1040) |
| | 5′-GAUAGAUGCUGAUAGCCGCCCAAAGUU-3′ | (SEQ ID NO: 2465) |
| | 3′-CUAUCUACGACUAUCGGCGGGUUUCAA-5′ | (SEQ ID NO: 685) |
| EGFR-m3168 Target: | 5′-GATAGATGCTGATAGCCGCCCAAAGTT-3′ | (SEQ ID NO: 1041) |
| | 5′-GAGCUGCCGUGUCAAAGAAGACGCCUU-3′ | (SEQ ID NO: 2466) |
| | 3′-CUCGACGGCACAGUUUCUUCUGCGGAA-5′ | (SEQ ID NO: 686) |
| EGFR-m3474 Target: | 5′-GAGCTGCCGTGTCAAAGAAGACGCCTT-3′ | (SEQ ID NO: 1042) |
| | 5′-AGCUGCCGUGUCAAAGAAGACGCCUUC-3′ | (SEQ ID NO: 2467) |
| | 3′-UCGACGGCACAGUUUCUUCUGCGGAAG-5′ | (SEQ ID NO: 687) |
| EGFR-m3475 Target: | 5′-AGCTGCCGTGTCAAAGAAGACGCCTTC-3′ | (SEQ ID NO: 1043) |
| | 5′-AAGACGCCUUCUUGCAGCGGUACAGCU-3′ | (SEQ ID NO: 2468) |
| | 3′-UUCUGCGGAAGAACGUCGCCAUGUCGA-5′ | (SEQ ID NO: 688) |
| EGFR-m3491 Target: | 5′-AAGACGCCTTCTTGCAGCGGTACAGCT-3′ | (SEQ ID NO: 1044) |
| | 5′-AGACGCCUUCUUGCAGCGGUACAGCUC-3′ | (SEQ ID NO: 2469) |
| | 3′-UCUGCGGAAGAACGUCGCCAUGUCGAG-5′ | (SEQ ID NO: 689) |
| EGFR-m3492 Target: | 5′-AGACGCCTTCTTGCAGCGGTACAGCTC-3′ | (SEQ ID NO: 1045) |
| | 5′-GACGCCUUCUUGCAGCGGUACAGCUCC-3′ | (SEQ ID NO: 2470) |
| | 3′-CUGCGGAAGAACGUCGCCAUGUCGAGG-5′ | (SEQ ID NO: 690) |
| EGFR-m3493 Target: | 5′-GACGCCTTCTTGCAGCGGTACAGCTCC-3′ | (SEQ ID NO: 1046) |
| | 5′-ACGCCUUCUUGCAGCGGUACAGCUCCG-3′ | (SEQ ID NO: 2471) |
| | 3′-UGCGGAAGAACGUCGCCAUGUCGAGGC-5′ | (SEQ ID NO: 691) |
| EGFR-m3494 Target: | 5′-ACGCCTTCTTGCAGCGGTACAGCTCCG-3′ | (SEQ ID NO: 1047) |
| | 5′-CGCCUUCUUGCAGCGGUACAGCUCCGA-3′ | (SEQ ID NO: 2472) |
| | 3′-GCGGAAGAACGUCGCCAUGUCGAGGCU-5′ | (SEQ ID NO: 692) |
| EGFR-m3495 Target: | 5′-CGCCTTCTTGCAGCGGTACAGCTCCGA-3′ | (SEQ ID NO: 1048) |
| | 5′-GCCUUCUUGCAGCGGUACAGCUCCGAC-3′ | (SEQ ID NO: 2473) |
| | 3′-CGGAAGAACGUCGCCAUGUCGAGGCUG-5′ | (SEQ ID NO: 693) |
| EGFR-m3496 Target: | 5′-GCCTTCTTGCAGCGGTACAGCTCCGAC-3′ | (SEQ ID NO: 1049) |
| | 5′-CCUUCUUGCAGCGGUACAGCUCCGACC-3′ | (SEQ ID NO: 2474) |
| | 3′-GGAAGAACGUCGCCAUGUCGAGGCUGG-5′ | (SEQ ID NO: 694) |
| EGFR-m3497 Target: | 5′-CCTTCTTGCAGCGGTACAGCTCCGACC-3′ | (SEQ ID NO: 1050) |
| | 5′-GACUGGCUUUAAAGCAUAACUCUGAUG-3′ | (SEQ ID NO: 2475) |
| | 3′-CUGACCGAAAUUUCGUAUUGAGACUAC-5′ | (SEQ ID NO: 695) |
| EGFR-m4056 Target: | 5′-GACTGGCTTTAAAGCATAACTCTGATG-3′ | (SEQ ID NO: 1051) |
| | 5′-AAGUGGGCCUCUCUCCUGAUGCACUUU-3′ | (SEQ ID NO: 2476) |
| | 3′-UUCACCCGGAGAGAGGACUACGUGAAA-5′ | (SEQ ID NO: 696) |
| EGFR-m4103 Target: | 5′-AAGTGGGCCTCTCTCCTGATGCACTTT-3′ | (SEQ ID NO: 1052) |
| | 5′-AGUGGGCCUCUCUCCUGAUGCACUUUG-3′ | (SEQ ID NO: 2477) |
| | 3′-UCACCCGGAGAGAGGACUACGUGAAAC-5′ | (SEQ ID NO: 697) |
| EGFR-m4104 Target: | 5′-AGTGGGCCTCTCTCCTGATGCACTTTG-3′ | (SEQ ID NO: 1053) |
| | 5′-GUGGGCCUCUCUCCUGAUGCACUUUGG-3′ | (SEQ ID NO: 2478) |
| | 3′-CACCCGGAGAGAGGACUACGUGAAACC-5′ | (SEQ ID NO: 698) |
| EGFR-m4105 Target: | 5′-GTGGGCCTCTCTCCTGATGCACTTTGG-3′ | (SEQ ID NO: 1054) |
| | 5′-UGGGCCUCUCUCCUGAUGCACUUUGGG-3′ | (SEQ ID NO: 2479) |
| | 3′-ACCCGGAGAGAGGACUACGUGAAACCC-5′ | (SEQ ID NO: 699) |
| EGFR-m4106 Target: | 5′-TGGGCCTCTCTCCTGATGCACTTTGGG-3′ | (SEQ ID NO: 1055) |
| | 5′-GCCUCUCUCCUGAUGCACUUUGGGAAG-3′ | (SEQ ID NO: 2480) |
| | 3′-CGGAGAGAGGACUACGUGAAACCCUUC-5′ | (SEQ ID NO: 700) |
| EGFR-m4109 Target: | 5′-GCCTCTCTCCTGATGCACTTTGGGAAG-3′ | (SEQ ID NO: 1056) |
| | 5′-GAUUGAUGCACUCUUGUAGUCUGGUAC-3′ | (SEQ ID NO: 2481) |
| | 3′-CUAACUACGUGAGAACAUCAGACCAUG-5′ | (SEQ ID NO: 701) |
| EGFR-m4309 Target: | 5′-GATTGATGCACTCTTGTAGTCTGGTAC-3′ | (SEQ ID NO: 1057) |
| | 5′-UAGACUUCCUUCUAUGUUUUCUGUUUC-3′ | (SEQ ID NO: 2482) |
| | 3′-AUCUGAAGGAAGAUACAAAAGACAAAG-5′ | (SEQ ID NO: 702) |
| EGFR-m4619 Target: | 5′-TAGACTTCCTTCTATGTTTTCTGTTTC-3′ | (SEQ ID NO: 1058) |
| | 5′-CUUCUAUGUUUUCUGUUUCAUUGUUUU-3′ | (SEQ ID NO: 2483) |
| | 3′-GAAGAUACAAAAGACAAAGUAACAAAA-5′ | (SEQ ID NO: 703) |
| EGFR-m4627 Target: | 5′-CTTCTATGTTTTCTGTTTCATTGTTTT-3′ | (SEQ ID NO: 1059) |
| | 5′-UAUGUUUUUCUUCCUGGUAAACUGCAG-3′ | (SEQ ID NO: 2484) |
| | 3′-AUACAAAAAGAAGGACCAUUUGACGUC-5′ | (SEQ ID NO: 704) |
| EGFR-m5006 Target: | 5′-TATGTTTTTCTTCCTGGTAAACTGCAG-3′ | (SEQ ID NO: 1060) |
| | 5′-AUGUUUUUCUUCCUGGUAAACUGCAGC-3′ | (SEQ ID NO: 2485) |
| | 3′-UACAAAAAGAAGGACCAUUUGACGUCG-5′ | (SEQ ID NO: 705) |
| EGFR-m5007 Target: | 5′-ATGTTTTTCTTCCTGGTAAACTGCAGC-3′ | (SEQ ID NO: 1061) |
| | 5′-UGUUUUUCUUCCUGGUAAACUGCAGCC-3′ | (SEQ ID NO: 2486) |
| | 3′-ACAAAAAGAAGGACCAUUUGACGUCGG-5′ | (SEQ ID NO: 706) |
| EGFR-m5008 Target: | 5′-TGTTTTTCTTCCTGGTAAACTGCAGCC-3′ | (SEQ ID NO: 1062) |
| | 5′-UUUCUUCCUGGUAAACUGCAGCCAAAC-3′ | (SEQ ID NO: 2487) |
| | 3′-AAAGAAGGACCAUUUGACGUCGGUUUG-5′ | (SEQ ID NO: 707) |
| EGFR-m5012 Target: | 5′-TTTCTTCCTGGTAAACTGCAGCCAAAC-3′ | (SEQ ID NO: 1063) |
| | 5′-UUCGAUCUUCCUAAUGCUGUGACCCUU-3′ | (SEQ ID NO: 2488) |
| | 3′-AAGCUAGAAGGAUUACGACACUGGGAA-5′ | (SEQ ID NO: 708) |
| EGFR-m5329 Target: | 5′-TTCGATCTTCCTAATGCTGTGACCCTT-3′ | (SEQ ID NO: 1064) |
| | 5′-UCGAUCUUCCUAAUGCUGUGACCCUUU-3′ | (SEQ ID NO: 2489) |
| | 3′-AGCUAGAAGGAUUACGACACUGGGAAA-5′ | (SEQ ID NO: 709) |
| EGFR-m5330 Target: | 5′-TCGATCTTCCTAATGCTGTGACCCTTT-3′ | (SEQ ID NO: 1065) |
| | 5′-UUGUUGCUACUUCAUAACUGUAAAUUU-3′ | (SEQ ID NO: 2490) |
| | 3′-AACAACGAUGAAGUAUUGACAUUUAAA-5′ | (SEQ ID NO: 710) |
| EGFR-m5403 Target: | 5′-TTGTTGCTACTTCATAACTGTAAATTT-3′ | (SEQ ID NO: 1066) |
| | 5′-GCUUGCAGCAUCCUCUGGUUUCCUAAC-3′ | (SEQ ID NO: 2491) |
| | 3′-CGAACGUCGUAGGAGACCAAAGGAUUG-5′ | (SEQ ID NO: 711) |
| EGFR-m5638 Target: | 5′-GCTTGCAGCATCCTCTGGTTTCCTAAC-3′ | (SEQ ID NO: 1067) |
| | 5′-CGUUGCAAGCCACUCUAACUGUAGCAA-3′ | (SEQ ID NO: 2492) |
| | 3′-GCAACGUUCGGUGAGAUUGACAUCGUU-5′ | (SEQ ID NO: 712) |
| EGFR-m5895 Target: | 5′-CGTTGCAAGCCACTCTAACTGTAGCAA-3′ | (SEQ ID NO: 1068) |

[0252] Within Tables 2-5 and 7-10 above, underlined residues indicate 2′-O-methyl residues, UPPER CASE indicates ribonucleotides, and lower case denotes deoxyribonucleotides. The DsiRNA agents of Tables 2-5 above are 25/27mer agents possessing a blunt end. The structures and/or modification patterning of the agents of Tables 2-5 and 7-10 above can be readily adapted to the above generic sequence structures, e.g., the 3′ overhang of the second strand can be extended or contracted, 2′-O-methylation of the second strand can be expanded towards the 5′ end of the second strand, optionally at alternating sites, etc. Such further modifications are optional, as 25/27mer DsiRNAs with such modifications can also be readily designed from the above DsiRNA agents and are also expected to be functional inhibitors of EGFR expression. Similarly, the 27mer “blunt/fray” and “blunt/blunt” DsiRNA structures and/or modification patterns of the agents of Tables 7-10 above can also be readily adapted to the above generic sequence structures, e.g., for application of modification patterning of the antisense strand to such structures and/or adaptation of such sequences to the above generic structures.

[0253] In certain embodiments, 27mer DsiRNAs possessing independent strand lengths each of 27 nucleotides are designed and synthesized for targeting of the same sites within the EGFR transcript as the asymmetric “ 25/27” structures shown in Tables 2-5 herein. Exemplary “27/27” DsiRNAs are optionally designed with a “blunt/fray” structure as shown for the DsiRNAs of Tables 7-8 above, or with a “blunt/blunt” structure as shown for the DsiRNAs of Tables 9-10 above.

[0254] In certain embodiments, the dsRNA agents of the invention require, e.g., at least 19, at least 20, at least 21, at least 22, at least 23, at least 24, at least 25 or at least 26 residues of the first strand to be complementary to corresponding residues of the second strand. In certain related embodiments, these first strand residues complementary to corresponding residues of the second strand are optionally consecutive residues.

[0255] By definition, “sufficiently complementary” (contrasted with, e.g., “100% complementary”) allows for one or more mismatches to exist between a dsRNA of the invention and the target RNA or cDNA sequence (e.g., EGFR mRNA), provided that the dsRNA possesses complementarity sufficient to trigger the destruction of the target RNA by the RNAi machinery (e.g., the RISC complex) or process. In certain embodiments, a “sufficiently complementary” dsRNA of the invention can harbor one, two, three or even four or more mismatches between the dsRNA sequence and the target RNA or cDNA sequence (e.g., in certain such embodiments, the antisense strand of the dsRNA harbors one, two, three, four, five or even six or more mismatches when aligned with the target RNA or cDNA sequence). Additional consideration of the preferred location of such mismatches within certain dsRNAs of the instant invention is considered in greater detail below.

[0256] As used herein “DsiRNAmm” refers to a DisRNA having a “mismatch tolerant region” containing one, two, three or four mismatched base pairs of the duplex formed by the sense and antisense strands of the DsiRNA, where such mismatches are positioned within the DsiRNA at a location(s) lying between (and thus not including) the two terminal base pairs of either end of the DsiRNA. The mismatched base pairs are located within a “mismatch-tolerant region” which is defined herein with respect to the location of the projected Ago2 cut site of the corresponding target nucleic acid. The mismatch tolerant region is located “upstream of” the projected Ago2 cut site of the target strand. “Upstream” in this context will be understood as the 5′-most portion of the DsiRNAmm duplex, where 5′ refers to the orientation of the sense strand of the DsiRNA duplex. Therefore, the mismatch tolerant region is upstream of the base on the sense (passenger) strand that corresponds to the projected Ago2 cut site of the target nucleic acid (see FIG. 1); alternatively, when referring to the antisense (guide) strand of the DsiRNAmm, the mismatch tolerant region can also be described as positioned downstream of the base that is complementary to the projected Ago2 cut site of the target nucleic acid, that is, the 3′-most portion of the antisense strand of the DsiRNAmm (where position 1 of the antisense strand is the 5′ terminal nucleotide of the antisense strand, see FIG. 1).

[0257] In one embodiment, for example with numbering as depicted in FIG. 1, the mismatch tolerant region is positioned between and including base pairs 3-9 when numbered from the nucleotide starting at the 5′ end of the sense strand of the duplex. Therefore, a DsiRNAmm of the invention possesses a single mismatched base pair at any one of positions 3, 4, 5, 6, 7, 8 or 9 of the sense strand of a right-hand extended DsiRNA (where position 1 is the 5′ terminal nucleotide of the sense strand and position 9 is the nucleotide residue of the sense strand that is immediately 5′ of the projected Ago2 cut site of the target EGFR RNA sequence corresponding to the sense strand sequence). In certain embodiments, for a DsiRNAmm that possesses a mismatched base pair nucleotide at any of positions 3, 4, 5, 6, 7, 8 or 9 of the sense strand, the corresponding mismatched base pair nucleotide of the antisense strand not only forms a mismatched base pair with the DsiRNAmm sense strand sequence, but also forms a mismatched base pair with a DsiRNAmm target EGFR RNA sequence (thus, complementarity between the antisense strand sequence and the sense strand sequence is disrupted at the mismatched base pair within the DsiRNAmm, and complementarity is similarly disrupted between the antisense strand sequence of the DsiRNAmm and the target EGFR RNA sequence). In alternative embodiments, the mismatch base pair nucleotide of the antisense strand of a DsiRNAmm only form a mismatched base pair with a corresponding nucleotide of the sense strand sequence of the DsiRNAmm, yet base pairs with its corresponding target EGFR RNA sequence nucleotide (thus, complementarity between the antisense strand sequence and the sense strand sequence is disrupted at the mismatched base pair within the DsiRNAmm, yet complementarity is maintained between the antisense strand sequence of the DsiRNAmm and the target EGFR RNA sequence).

[0258] A DsiRNAmm of the invention that possesses a single mismatched base pair within the mismatch-tolerant region (mismatch region) as described above (e.g., a DsiRNAmm harboring a mismatched nucleotide residue at any one of positions 3, 4, 5, 6, 7, 8 or 9 of the sense strand) can further include one, two or even three additional mismatched base pairs. In preferred embodiments, these one, two or three additional mismatched base pairs of the DsiRNAmm occur at position(s) 3, 4, 5, 6, 7, 8 and/or 9 of the sense strand (and at corresponding residues of the antisense strand). In one embodiment where one additional mismatched base pair is present within a DsiRNAmm, the two mismatched base pairs of the sense strand can occur, e.g., at nucleotides of both position 4 and position 6 of the sense strand (with mismatch also occurring at corresponding nucleotide residues of the antisense strand).

[0259] In DsiRNAmm agents possessing two mismatched base pairs, mismatches can occur consecutively (e.g., at consecutive positions along the sense strand nucleotide sequence). Alternatively, nucleotides of the sense strand that form mismatched base pairs with the antisense strand sequence can be interspersed by nucleotides that base pair with the antisense strand sequence (e.g., for a DsiRNAmm possessing mismatched nucleotides at positions 3 and 6, but not at positions 4 and 5, the mismatched residues of sense strand positions 3 and 6 are interspersed by two nucleotides that form matched base pairs with corresponding residues of the antisense strand). For example, two residues of the sense strand (located within the mismatch-tolerant region of the sense strand) that form mismatched base pairs with the corresponding antisense strand sequence can occur with zero, one, two, three, four or five matched base pairs located between these mismatched base pairs.

[0260] For certain DsiRNAmm agents possessing three mismatched base pairs, mismatches can occur consecutively (e.g., in a triplet along the sense strand nucleotide sequence). Alternatively, nucleotides of the sense strand that form mismatched base pairs with the antisense strand sequence can be interspersed by nucleotides that form matched base pairs with the antisense strand sequence (e.g., for a DsiRNAmm possessing mismatched nucleotides at positions 3, 4 and 8, but not at positions 5, 6 and 7, the mismatched residues of sense strand positions 3 and 4 are adjacent to one another, while the mismatched residues of sense strand positions 4 and 8 are interspersed by three nucleotides that form matched base pairs with corresponding residues of the antisense strand). For example, three residues of the sense strand (located within the mismatch-tolerant region of the sense strand) that form mismatched base pairs with the corresponding antisense strand sequence can occur with zero, one, two, three or four matched base pairs located between any two of these mismatched base pairs.

[0261] For certain DsiRNAmm agents possessing four mismatched base pairs, mismatches can occur consecutively (e.g., in a quadruplet along the sense strand nucleotide sequence). Alternatively, nucleotides of the sense strand that form mismatched base pairs with the antisense strand sequence can be interspersed by nucleotides that form matched base pairs with the antisense strand sequence (e.g., for a DsiRNAmm possessing mismatched nucleotides at positions 3, 5, 7 and 8, but not at positions 4 and 6, the mismatched residues of sense strand positions 7 and 8 are adjacent to one another, while the mismatched residues of sense strand positions 3 and 5 are interspersed by one nucleotide that forms a matched base pair with the corresponding residue of the antisense strand—similarly, the mismatched residues of sense strand positions 5 and 7 are also interspersed by one nucleotide that forms a matched base pair with the corresponding residue of the antisense strand). For example, four residues of the sense strand (located within the mismatch-tolerant region of the sense strand) that form mismatched base pairs with the corresponding antisense strand sequence can occur with zero, one, two or three matched base pairs located between any two of these mismatched base pairs.

[0262] In another embodiment, for example with numbering also as depicted in FIG. 1, a DsiRNAmm of the invention comprises a mismatch tolerant region which possesses a single mismatched base pair nucleotide at any one of positions 17, 18, 19, 20, 21, 22 or 23 of the antisense strand of the DsiRNA (where position 1 is the 5′ terminal nucleotide of the antisense strand and position 17 is the nucleotide residue of the antisense strand that is immediately 3′ (downstream) in the antisense strand of the projected Ago2 cut site of the target EGFR RNA sequence sufficiently complementary to the antisense strand sequence). In certain embodiments, for a DsiRNAmm that possesses a mismatched base pair nucleotide at any of positions 17, 18, 19, 20, 21, 22 or 23 of the antisense strand with respect to the sense strand of the DsiRNAmm, the mismatched base pair nucleotide of the antisense strand not only forms a mismatched base pair with the DsiRNAmm sense strand sequence, but also forms a mismatched base pair with a DsiRNAmm target EGFR RNA sequence (thus, complementarity between the antisense strand sequence and the sense strand sequence is disrupted at the mismatched base pair within the DsiRNAmm, and complementarity is similarly disrupted between the antisense strand sequence of the DsiRNAmm and the target EGFR RNA sequence). In alternative embodiments, the mismatch base pair nucleotide of the antisense strand of a DsiRNAmm only forms a mismatched base pair with a corresponding nucleotide of the sense strand sequence of the DsiRNAmm, yet base pairs with its corresponding target EGFR RNA sequence nucleotide (thus, complementarity between the antisense strand sequence and the sense strand sequence is disrupted at the mismatched base pair within the DsiRNAmm, yet complementarity is maintained between the antisense strand sequence of the DsiRNAmm and the target EGFR RNA sequence).

[0263] A DsiRNAmm of the invention that possesses a single mismatched base pair within the mismatch-tolerant region as described above (e.g., a DsiRNAmm harboring a mismatched nucleotide residue at positions 17, 18, 19, 20, 21, 22 or 23 of the antisense strand) can further include one, two or even three additional mismatched base pairs. In preferred embodiments, these one, two or three additional mismatched base pairs of the DsiRNAmm occur at position(s) 17, 18, 19, 20, 21, 22 and/or 23 of the antisense strand (and at corresponding residues of the sense strand). In one embodiment where one additional mismatched base pair is present within a DsiRNAmm, the two mismatched base pairs of the antisense strand can occur, e.g., at nucleotides of both position 18 and position 20 of the antisense strand (with mismatch also occurring at corresponding nucleotide residues of the sense strand).

[0264] In DsiRNAmm agents possessing two mismatched base pairs, mismatches can occur consecutively (e.g., at consecutive positions along the antisense strand nucleotide sequence). Alternatively, nucleotides of the antisense strand that form mismatched base pairs with the sense strand sequence can be interspersed by nucleotides that base pair with the sense strand sequence (e.g., for a DsiRNAmm possessing mismatched nucleotides at positions 17 and 20, but not at positions 18 and 19, the mismatched residues of antisense strand positions 17 and 20 are interspersed by two nucleotides that form matched base pairs with corresponding residues of the sense strand). For example, two residues of the antisense strand (located within the mismatch-tolerant region of the sense strand) that form mismatched base pairs with the corresponding sense strand sequence can occur with zero, one, two, three, four, five, six or seven matched base pairs located between these mismatched base pairs.

[0265] For certain DsiRNAmm agents possessing three mismatched base pairs, mismatches can occur consecutively (e.g., in a triplet along the antisense strand nucleotide sequence). Alternatively, nucleotides of the antisense strand that form mismatched base pairs with the sense strand sequence can be interspersed by nucleotides that form matched base pairs with the sense strand sequence (e.g., for a DsiRNAmm possessing mismatched nucleotides at positions 17, 18 and 22, but not at positions 19, 20 and 21, the mismatched residues of antisense strand positions 17 and 18 are adjacent to one another, while the mismatched residues of antisense strand positions 18 and 122 are interspersed by three nucleotides that form matched base pairs with corresponding residues of the sense strand). For example, three residues of the antisense strand (located within the mismatch-tolerant region of the antisense strand) that form mismatched base pairs with the corresponding sense strand sequence can occur with zero, one, two, three, four, five or six matched base pairs located between any two of these mismatched base pairs.

[0266] For certain DsiRNAmm agents possessing four mismatched base pairs, mismatches can occur consecutively (e.g., in a quadruplet along the antisense strand nucleotide sequence). Alternatively, nucleotides of the antisense strand that form mismatched base pairs with the sense strand sequence can be interspersed by nucleotides that form matched base pairs with the sense strand sequence (e.g., for a DsiRNAmm possessing mismatched nucleotides at positions 18, 20, 22 and 23, but not at positions 19 and 21, the mismatched residues of antisense strand positions 22 and 23 are adjacent to one another, while the mismatched residues of antisense strand positions 18 and 20 are interspersed by one nucleotide that forms a matched base pair with the corresponding residue of the sense strand—similarly, the mismatched residues of antisense strand positions 20 and 22 are also interspersed by one nucleotide that forms a matched base pair with the corresponding residue of the sense strand). For example, four residues of the antisense strand (located within the mismatch-tolerant region of the antisense strand) that form mismatched base pairs with the corresponding sense strand sequence can occur with zero, one, two, three, four or five matched base pairs located between any two of these mismatched base pairs.

[0267] For reasons of clarity, the location(s) of mismatched nucleotide residues within the above DsiRNAmm agents are numbered in reference to the 5′ terminal residue of either sense or antisense strands of the DsiRNAmm. The numbering of positions located within the mismatch-tolerant region (mismatch region) of the antisense strand can shift with variations in the proximity of the 5′ terminus of the sense or antisense strand to the projected Ago2 cleavage site. Thus, the location(s) of preferred mismatch sites within either antisense strand or sense strand can also be identified as the permissible proximity of such mismatches to the projected Ago2 cut site. Accordingly, in one preferred embodiment, the position of a mismatch nucleotide of the sense strand of a DsiRNAmm is the nucleotide residue of the sense strand that is located immediately 5′ (upstream) of the projected Ago2 cleavage site of the corresponding target EGFR RNA sequence. In other preferred embodiments, a mismatch nucleotide of the sense strand of a DsiRNAmm is positioned at the nucleotide residue of the sense strand that is located two nucleotides 5′ (upstream) of the projected Ago2 cleavage site, three nucleotides 5′ (upstream) of the projected Ago2 cleavage site, four nucleotides 5′ (upstream) of the projected Ago2 cleavage site, five nucleotides 5′ (upstream) of the projected Ago2 cleavage site, six nucleotides 5′ (upstream) of the projected Ago2 cleavage site, seven nucleotides 5′ (upstream) of the projected Ago2 cleavage site, eight nucleotides 5′ (upstream) of the projected Ago2 cleavage site, or nine nucleotides 5′ (upstream) of the projected Ago2 cleavage site.

[0268] Exemplary single mismatch-containing 25/27mer DsiRNAs (DsiRNAmm) include the following structures (such mismatch-containing structures may also be incorporated into other exemplary DsiRNA structures shown herein).

5′-XX^{M}XXXXXXXXXXXXXXXXXXXXDD-3′
3′-XXXX_{M}XXXXXXXXXXXXXXXXXXXXXX-5′
5′-XXX^{M}XXXXXXXXXXXXXXXXXXXDD-3′
3′-XXXXX_{M}XXXXXXXXXXXXXXXXXXXXX-5′
5′-XXXX^{M}XXXXXXXXXXXXXXXXXXDD-3′
3′-XXXXXX_{M}XXXXXXXXXXXXXXXXXXXX-5′
5′-XXXXX^{M}XXXXXXXXXXXXXXXXXDD-3′
3′-XXXXXXX_{M}XXXXXXXXXXXXXXXXXXX-5′
5′-XXXXXX^{M}XXXXXXXXXXXXXXXXDD-3′
3′-XXXXXXXX_{M}XXXXXXXXXXXXXXXXXX-5′
5′-XXXXXXX^{M}XXXXXXXXXXXXXXXDD-3′
3′-XXXXXXXXX_{M}XXXXXXXXXXXXXXXXX-5′
5′-XXXXXXXX^{M}XXXXXXXXXXXXXXDD-3′
3′-XXXXXXXXXX_{M}XXXXXXXXXXXXXXXX-5′

wherein “X”=RNA, “D”=DNA and “M”=Nucleic acid residues (RNA, DNA or non-natural or modified nucleic acids) that do not base pair (hydrogen bond) with corresponding “M” residues of otherwise complementary strand when strands are annealed. Any of the residues of such agents can optionally be 2′-O-methyl RNA monomers—alternating positioning of 2′-O-methyl RNA monomers that commences from the 3′-terminal residue of the bottom (second) strand, as shown above, can also be used in the above DsiRNAmm agents. For the above mismatch structures, the top strand is the sense strand, and the bottom strand is the antisense strand.

[0269] In certain embodiments, a DsiRNA of the invention can contain mismatches that exist in reference to the target EGFR RNA sequence yet do not necessarily exist as mismatched base pairs within the two strands of the DsiRNA—thus, a DsiRNA can possess perfect complementarity between first and second strands of a DsiRNA, yet still possess mismatched residues in reference to a target EGFR RNA (which, in certain embodiments, may be advantageous in promoting efficacy and/or potency and/or duration of effect). In certain embodiments, where mismatches occur between antisense strand and target EGFR RNA sequence, the position of a mismatch is located within the antisense strand at a position(s) that corresponds to a sequence of the sense strand located 5′ of the projected Ago2 cut site of the target region—e.g., antisense strand residue(s) positioned within the antisense strand to the 3′ of the antisense residue which is complementary to the projected Ago2 cut site of the target sequence.

[0270] Exemplary 25/27mer DsiRNAs that harbor a single mismatched residue in reference to target sequences include the following structures.

| | |
|---|---|
| Target RNA Sequence: | 5′-. . . AXXXXXXXXXXXXXXXXXXXX . . .-3′ |
| DsiRNAmm Sense Strand: | 5′-XXXXXXXXXXXXXXXXXXXXXXXDD-3′ |
| DsiRNAmm Antisense Strand: | 3′-EXXXXXXXXXXXXXXXXXXXXXXXXXX-5′ |
| Target RNA Sequence: | 5′-. . . XAXXXXXXXXXXXXXXXXXXX . . .-3′ |
| DsiRNAmm Sense Strand: | 5′-XXXXXXXXXXXXXXXXXXXXXXXDD-3′ |
| DsiRNAmm Antisense Strand: | 3′-XEXXXXXXXXXXXXXXXXXXXXXXXXX-5′ |
| Target RNA Sequence: | 5′-. . . AXXXXXXXXXXXXXXXXXX . . .-3′ |
| DsiRNAmm Sense Strand: | 5′-BXXXXXXXXXXXXXXXXXXXXXXDD-3′ |
| DsiRNAmm Antisense Strand: | 3′-XXEXXXXXXXXXXXXXXXXXXXXXXXX-5′ |
| Target RNA Sequence: | 5′-. . . XAXXXXXXXXXXXXXXXXX . . .-3′ |
| DsiRNAmm Sense Strand: | 5′-XBXXXXXXXXXXXXXXXXXXXXXDD-3′ |
| DsiRNAmm Antisense Strand: | 3′-XXXEXXXXXXXXXXXXXXXXXXXXXXX-5′ |
| Target RNA Sequence: | 5′-. . . XXAXXXXXXXXXXXXXXXX . . .-3′ |
| DsiRNAmm Sense Strand: | 5′-XXBXXXXXXXXXXXXXXXXXXXXDD-3′ |
| DsiRNAmm Antisense Strand: | 3′-XXXXEXXXXXXXXXXXXXXXXXXXXXX-5′ |
| Target RNA Sequence: | 5′-. . . XXXAXXXXXXXXXXXXXXX . . .-3′ |
| DsiRNAmm Sense Strand: | 5′-XXXBXXXXXXXXXXXXXXXXXXXDD-3′ |
| DsiRNAmm Antisense Strand: | 3′-XXXXXEXXXXXXXXXXXXXXXXXXXXX-5′ |
| Target RNA Sequence: | 5′-. . . XXXXAXXXXXXXXXXXXXX . . .-3′ |
| DsiRNAmm Sense Strand: | 5′-XXXXBXXXXXXXXXXXXXXXXXXDD-3′ |
| DsiRNAmm Antisense Strand: | 3′-XXXXXXEXXXXXXXXXXXXXXXXXXXX-5′ |
| Target RNA Sequence: | 5′-. . . XXXXXAXXXXXXXXXXXXX . . .-3′ |
| DsiRNAmm Sense Strand: | 5′-XXXXXBXXXXXXXXXXXXXXXXXDD-3′ |
| DsiRNAmm Antisense Strand: | 3′-XXXXXXXEXXXXXXXXXXXXXXXXXXX-5′ |
| Target RNA Sequence: | 5′-. . . XXXXXXAXXXXXXXXXXXX . . .-3′ |
| DsiRNAmm Sense Strand: | 5′-XXXXXXBXXXXXXXXXXXXXXXXDD-3′ |
| DsiRNAmm Antisense Strand: | 3′-XXXXXXXXEXXXXXXXXXXXXXXXXXX-5′ |
| Target RNA Sequence: | 5′-. . . XXXXXXXAXXXXXXXXXXX . . .-3′ |
| DsiRNAmm Sense Strand: | 5′-XXXXXXXBXXXXXXXXXXXXXXXDD-3′ |
| DsiRNAmm Antisense Strand: | 3′-XXXXXXXXXEXXXXXXXXXXXXXXXXX-5′ |
| Target RNA Sequence: | 5′-. . . XXXXXXXXAXXXXXXXXXX . . .-3′ |
| DsiRNAmm Sense Strand: | 5′-XXXXXXXXBXXXXXXXXXXXXXXDD-3′ |
| DsiRNAmm Antisense Strand: | 3′-XXXXXXXXXXEXXXXXXXXXXXXXXXX-5′ |

wherein “X”=RNA, “D”=DNA and “E”=Nucleic acid residues (RNA, DNA or non-natural or modified nucleic acids) that do not base pair (hydrogen bond) with corresponding “A” RNA residues of otherwise complementary (target) strand when strands are annealed, yet optionally do base pair with corresponding “B” residues (“B” residues are also RNA, DNA or non-natural or modified nucleic acids). Any of the residues of such agents can optionally be 2′-O-methyl RNA monomers—alternating positioning of 2′-O-methyl RNA monomers that commences from the 3′-terminal residue of the bottom (second) strand, as shown above, can also be used in the above DsiRNA agents.

[0271] In certain embodiments, the guide strand of a dsRNA of the invention that is sufficiently complementary to a target RNA (e.g., mRNA) along at least 19 nucleotides of the target gene sequence to reduce target gene expression is not perfectly complementary to the at least 19 nucleotide long target gene sequence. Rather, it is appreciated that the guide strand of a dsRNA of the invention that is sufficiently complementary to a target mRNA along at least 19 nucleotides of a target RNA sequence to reduce target gene expression can have one, two, three, or even four or more nucleotides that are mismatched with the 19 nucleotide or longer target strand sequence. Thus, for a 19 nucleotide target RNA sequence, the guide strand of a dsRNA of the invention can be sufficiently complementary to the target RNA sequence to reduce target gene levels while possessing, e.g., only 15/19, 16/19, 17/19 or 18/19 matched nucleotide residues between guide strand and target RNA sequence.

[0272] In addition to the above-exemplified structures, dsRNAs of the invention can also possess one, two or three additional residues that form further mismatches with the target EGFR RNA sequence. Such mismatches can be consecutive, or can be interspersed by nucleotides that form matched base pairs with the target EGFR RNA sequence. Where interspersed by nucleotides that form matched base pairs, mismatched residues can be spaced apart from each other within a single strand at an interval of one, two, three, four, five, six, seven or even eight base paired nucleotides between such mismatch-forming residues.

[0273] As for the above-described DsiRNAmm agents, a preferred location within dsRNAs (e.g., DsiRNAs) for antisense strand nucleotides that form mismatched base pairs with target EGFR RNA sequence (yet may or may not form mismatches with corresponding sense strand nucleotides) is within the antisense strand region that is located 3′ (downstream) of the antisense strand sequence which is complementary to the projected Ago2 cut site of the DsiRNA (e.g., in FIG. 1, the region of the antisense strand which is 3′ of the projected Ago2 cut site is preferred for mismatch-forming residues and happens to be located at positions 17-23 of the antisense strand for the 25/27mer agent shown in FIG. 1). Thus, in one embodiment, the position of a mismatch nucleotide (in relation to the target EGFR RNA sequence) of the antisense strand of a DsiRNAmm is the nucleotide residue of the antisense strand that is located immediately 3′ (downstream) within the antisense strand sequence of the projected Ago2 cleavage site of the corresponding target EGFR RNA sequence. In other preferred embodiments, a mismatch nucleotide of the antisense strand of a DsiRNAmm (in relation to the target EGFR RNA sequence) is positioned at the nucleotide residue of the antisense strand that is located two nucleotides 3′ (downstream) of the corresponding projected Ago2 cleavage site, three nucleotides 3′ (downstream) of the corresponding projected Ago2 cleavage site, four nucleotides 3′ (downstream) of the corresponding projected Ago2 cleavage site, five nucleotides 3′ (downstream) of the corresponding projected Ago2 cleavage site, six nucleotides 3′ (downstream) of the projected Ago2 cleavage site, seven nucleotides 3′ (downstream) of the projected Ago2 cleavage site, eight nucleotides 3′ (downstream) of the projected Ago2 cleavage site, or nine nucleotides 3′ (downstream) of the projected Ago2 cleavage site.

[0274] In dsRNA agents possessing two mismatch-forming nucleotides of the antisense strand (where mismatch-forming nucleotides are mismatch forming in relation to target EGFR RNA sequence), mismatches can occur consecutively (e.g., at consecutive positions along the antisense strand nucleotide sequence). Alternatively, nucleotides of the antisense strand that form mismatched base pairs with the target EGFR RNA sequence can be interspersed by nucleotides that base pair with the target EGFR RNA sequence (e.g., for a DsiRNA possessing mismatch-forming nucleotides at positions 17 and 20 (starting from the 5′ terminus (position 1) of the antisense strand of the 25/27mer agent shown in FIG. 1), but not at positions 18 and 19, the mismatched residues of sense strand positions 17 and 20 are interspersed by two nucleotides that form matched base pairs with corresponding residues of the target EGFR RNA sequence). For example, two residues of the antisense strand (located within the mismatch-tolerant region of the antisense strand) that form mismatched base pairs with the corresponding target EGFR RNA sequence can occur with zero, one, two, three, four or five matched base pairs (with respect to target EGFR RNA sequence) located between these mismatch-forming base pairs.

[0275] For certain dsRNAs possessing three mismatch-forming base pairs (mismatch-forming with respect to target EGFR RNA sequence), mismatch-forming nucleotides can occur consecutively (e.g., in a triplet along the antisense strand nucleotide sequence). Alternatively, nucleotides of the antisense strand that form mismatched base pairs with the target EGFR RNA sequence can be interspersed by nucleotides that form matched base pairs with the target EGFR RNA sequence (e.g., for a DsiRNA possessing mismatched nucleotides at positions 17, 18 and 22, but not at positions 19, 20 and 21, the mismatch-forming residues of antisense strand positions 17 and 18 are adjacent to one another, while the mismatch-forming residues of antisense strand positions 18 and 22 are interspersed by three nucleotides that form matched base pairs with corresponding residues of the target EGFR RNA). For example, three residues of the antisense strand (located within the mismatch-tolerant region of the antisense strand) that form mismatched base pairs with the corresponding target EGFR RNA sequence can occur with zero, one, two, three or four matched base pairs located between any two of these mismatch-forming base pairs.

[0276] For certain dsRNAs possessing four mismatch-forming base pairs (mismatch-forming with respect to target EGFR RNA sequence), mismatch-forming nucleotides can occur consecutively (e.g., in a quadruplet along the sense strand nucleotide sequence). Alternatively, nucleotides of the antisense strand that form mismatched base pairs with the target EGFR RNA sequence can be interspersed by nucleotides that form matched base pairs with the target EGFR RNA sequence (e.g., for a DsiRNA possessing mismatch-forming nucleotides at positions 17, 19, 21 and 22, but not at positions 18 and 20, the mismatch-forming residues of antisense strand positions 21 and 22 are adjacent to one another, while the mismatch-forming residues of antisense strand positions 17 and 19 are interspersed by one nucleotide that forms a matched base pair with the corresponding residue of the target EGFR RNA sequence—similarly, the mismatch-forming residues of antisense strand positions 19 and 21 are also interspersed by one nucleotide that forms a matched base pair with the corresponding residue of the target EGFR RNA sequence). For example, four residues of the antisense strand (located within the mismatch-tolerant region of the antisense strand) that form mismatched base pairs with the corresponding target EGFR RNA sequence can occur with zero, one, two or three matched base pairs located between any two of these mismatch-forming base pairs.

[0277] The above DsiRNAmm and other dsRNA structures are described in order to exemplify certain structures of DsiRNAmm and dsRNA agents. Design of the above DsiRNAmm and dsRNA structures can be adapted to generate, e.g., DsiRNAmm forms of other DsiRNA structures shown infra. As exemplified above, dsRNAs can also be designed that possess single mismatches (or two, three or four mismatches) between the antisense strand of the dsRNA and a target sequence, yet optionally can retain perfect complementarity between sense and antisense strand sequences of a dsRNA.

[0278] It is further noted that the dsRNA agents exemplified infra can also possess insertion/deletion (in/del) structures within their double-stranded and/or target EGFR RNA-aligned structures. Accordingly, the dsRNAs of the invention can be designed to possess in/del variations in, e.g., antisense strand sequence as compared to target EGFR RNA sequence and/or antisense strand sequence as compared to sense strand sequence, with preferred location(s) for placement of such in/del nucleotides corresponding to those locations described above for positioning of mismatched and/or mismatch-forming base pairs.

[0279] It is also noted that the DsiRNAs of the instant invention can tolerate mismatches within the 3′-terminal region of the sense strand/5′-terminal region of the antisense strand, as this region is modeled to be processed by Dicer and liberated from the guide strand sequence that loads into RISC. Exemplary DsiRNA structures of the invention that harbor such mismatches include the following:

| | |
|---|---|
| Target RNA Sequence: | 5′-. . . XXXXXXXXXXXXXXXXXXXXXHXXX . . .-3′ |
| DsiRNA Sense Strand: | 5′-XXXXXXXXXXXXXXXXXXXXXIXDD-3′ |
| DsiRNA Antisense Strand: | 3′-XXXXXXXXXXXXXXXXXXXXXXXJXXX-5′ |
| Target RNA Sequence: | 5′-. . . XXXXXXXXXXXXXXXXXXXXXXHXX . . .-3′ |
| DsiRNA Sense Strand: | 5′-XXXXXXXXXXXXXXXXXXXXXXIDD-3′ |
| DsiRNA Antisense Strand: | 3′-XXXXXXXXXXXXXXXXXXXXXXXXJXX-5′ |
| Target RNA Sequence: | 5′-. . . XXXXXXXXXXXXXXXXXXXXXXXHX . . .-3′ |
| DsiRNA Sense Strand: | 5′-XXXXXXXXXXXXXXXXXXXXXXXID-3′ |
| DsiRNA Antisense Strand: | 3′-XXXXXXXXXXXXXXXXXXXXXXXXXJX-5′ |
| Target RNA Sequence: | 5′-. . . XXXXXXXXXXXXXXXXXXXXXXXXH . . .-3′ |
| DsiRNA Sense Strand: | 5′-XXXXXXXXXXXXXXXXXXXXXXXDI-3′ |
| DsiRNA Antisense Strand: | 3′-XXXXXXXXXXXXXXXXXXXXXXXXXXJ-5′ |

wherein “X”=RNA, “D”=DNA and “I” and “J”=Nucleic acid residues (RNA, DNA or non-natural or modified nucleic acids) that do not base pair (hydrogen bond) with one another, yet optionally “J” is complementary to target RNA sequence nucleotide “H”. Any of the residues of such agents can optionally be 2′-O-methyl RNA monomers—alternating positioning of 2′-O-methyl RNA monomers that commences from the 3′-terminal residue of the bottom (second) strand, as shown above—or any of the above-described methylation patterns—can also be used in the above DsiRNA agents. The above mismatches can also be combined within the DsiRNAs of the instant invention.

[0280] In the below structures, such mismatches are introduced within the asymmetric EGFR-4249 DsiRNA (newly-introduced mismatch residues are italicized): EGFR-4249 25/27mer DsiRNA, mismatch position=22 of sense strand (from 5′-terminus)

(SEQ ID NO: 2497)

5′-CUAUUGAUUUUUACUUCAAUG^{A}Gct-3′

(SEQ ID NO: 437)

3′-GCGAUAACUAAAAAUGAAGUUAC_{C}CGA-5′

Optionally, the mismatched “A” residue of position 22 of the sense strand is alternatively “U” or “C”.
EGFR-4249 25/27mer DsiRNA, mismatch position=23 of sense strand

(SEQ ID NO: 2498)

5′-CUAUUGAUUUUUACUUCAAUGG^{A}ct-3′

(SEQ ID NO: 437)

3′-GCGAUAACUAAAAAUGAAGUUACC_{C}GA-5′

Optionally, the mismatched “A” residue of position 23 of the sense strand is alternatively “C” or “U”.
EGFR-4249 25/27mer DsiRNA, mismatch position=24 of sense strand

(SEQ ID NO: 2499)

5′-CUAUUGAUUUUUACUUCAAUGGG^{a}t-3′

(SEQ ID NO: 437)

3′-GCGAUAACUAAAAAUGAAGUUACCC_{G}A-5′

Optionally, the mismatched “a” residue of position 24 of the sense strand is alternatively “g” or “t”.
EGFR-4249 25/27mer DsiRNA, mismatch position=25 of sense strand

(SEQ ID NO: 2500)

5′-CUAUUGAUUUUUACUUCAAUGGGa^{c}-3′

(SEQ ID NO: 437)

3′-GCGAUAACUAAAAAUGAAGUUACCCG_{A}-5′

Optionally, the mismatched “c” residue of position 25 of the sense strand is alternatively “a” or “g”.
EGFR-4249 25/27mer DsiRNA, mismatch position=1 of antisense strand

(SEQ ID NO: 81)

5′-CUAUUGAUUUUUACUUCAAUGGGa^{t}-3′

(SEQ ID NO: 2501)

3′-GCGAUAACUAAAAAUGAAGUUACCCG_{C}-5′

Optionally, the mismatched “C” residue of position 1 of the antisense strand is alternatively “G” or “U”.
EGFR-4249 25/27mer DsiRNA, mismatch position=2 of antisense strand

(SEQ ID NO: 81)

5′-CUAUUGAUUUUUACUUCAAUGGG^{a}t-3′

(SEQ ID NO: 2502)

3′-GCGAUAACUAAAAAUGAAGUUACCC_{C}A-5′

Optionally, the mismatched “C” residue of position 2 of the antisense strand is alternatively “G” or “A”.
EGFR-4249 25/27mer DsiRNA, mismatch position=3 of antisense strand

(SEQ ID NO: 81)

5′-CUAUUGAUUUUUACUUCAAUGG^{G}at-3′

(SEQ ID NO: 2503)

3′-GCGAUAACUAAAAAUGAAGUUACC_{A}GA-5′

Optionally, the mismatched “A” residue of position 3 of the antisense strand is alternatively “U” or “G”.
EGFR-4249 25/27mer DsiRNA, mismatch position=4 of antisense strand

(SEQ ID NO: 81)

5′-CUAUUGAUUUUUACUUCAAUG^{G}Gat-3′

(SEQ ID NO: 2504)

3′-GCGAUAACUAAAAAUGAAGUUAC_{A}CGA-5′

Optionally, the mismatched “A” residue of position 4 of the antisense strand is alternatively “U” or “G”.

[0281] As noted above, introduction of such mismatches can be performed upon any of the DsiRNAs described herein.

[0282] The mismatches of such DsiRNA structures can be combined to produce a DsiRNA possessing, e.g., two, three or even four mismatches within the 3′-terminal four nucleotides of the sense strand/5′-terminal four nucleotides of the antisense strand.

[0283] Indeed, in view of the flexibility of sequences which can be incorporated into DsiRNAs at the 3′-terminal residues of the sense strand/5′-terminal residues of the antisense strand, in certain embodiments, the sequence requirements of an asymmetric DsiRNA of the instant invention can be represented as the following (minimalist) structure (shown for an exemplary EGFR-4249 DsiRNA sequence):

(SEQ ID NO: 2505)

5′-CUAUUGAUUUUUACUUCAAUGXXX[X]ₙ-3′

(SEQ ID NO: 2506)

3′-GCGAUAACUAAAAAUGAAGUUXXXXX[X]ₙ-5′

where n=1 to 5, 1 to 10, 1 to 20, 1 to 30, 1 to 50, or 1 to 80 or more.

EGFR-4249 Target:

(SEQ ID NO: 2507)

5′-CGCTATTGATTTTTACTTCAAXXXXXX-3′

[0284] The EGFR target sight may also be a site which is targeted by one or more of several oligonucleotides whose complementary target sites overlap with a stated target site. For example, for an exemplary EGFR-2463 DsiRNA, it is noted that certain DsiRNAs targeting overlapping and only slightly offset EGFR sequences can exhibit activity levels similar to that of EGFR-2463 (specifically, see EGFR-2460, EGFR-2461, EGFR-2462, EGFR-2464 and EGFR-2465 DsiRNAs of Table 11 below. Thus, in certain embodiments, a designated target sequence region can be effectively targeted by a series of DsiRNAs possessing largely overlapping sequences. (E.g., if considering DsiRNAs surrounding the EGFR-2463 site, a more encompassing EGFR target sequence might be recited as, e.g., 5′-CTCTGGATCCCAGAAGGTGAGAAAGTTAAAAT-3′ (SEQ ID NO: 2508), wherein any given DsiRNA (e.g., a DsiRNA selected from EGFR-2460, EGFR-2461, EGFR-2462, EGFR-2463, EGFR-2464 and EGFR-2465) only targets a sub-sequence within such a sequence region, yet the entire sequence can be considered a viable target for such a series of DsiRNAs).

[0285] Additionally and/or alternatively, mismatches within the 3′-terminal four nucleotides of the sense strand/5′-terminal four nucleotides of the antisense strand can be combined with mismatches positioned at other mismatch-tolerant positions, as described above.

[0286] In view of the present identification of the above-described Dicer substrate agents (DsiRNAs) as inhibitors of EGFR levels via targeting of specific EGFR sequences, it is also recognized that dsRNAs having structures similar to those described herein can also be synthesized which target other sequences within the EGFR sequence of NM_{—}005228.3 or NM_{—}207655.2, or within variants thereof (e.g., target sequences possessing 80% identity, 90% identity, 95% identity, 96% identity, 97% identity, 98% identity, 99% or more identity to a sequence of NM_{—}005228.3 and/or NM_{—}207655.2).

### Anti-EGFR DsiRNA Design/Synthesis

[0287] It has been found empirically that longer dsRNA species of from 25 to 35 nucleotides (DsiRNAs) and especially from 25 to 30 nucleotides give unexpectedly effective results in terms of potency and duration of action, as compared to 19-23mer siRNA agents. Without wishing to be bound by the underlying theory of the dsRNA processing mechanism, it is thought that the longer dsRNA species serve as a substrate for the Dicer enzyme in the cytoplasm of a cell. In addition to cleaving the dsRNA of the invention into shorter segments, Dicer is thought to facilitate the incorporation of a single-stranded cleavage product derived from the cleaved dsRNA into the RISC complex that is responsible for the destruction of the cytoplasmic RNA (e.g., EGFR RNA) of or derived from the target gene, EGFR (or other gene associated with an EGFR-associated disease or disorder). Prior studies (Rossi et al., U.S. Patent Application No. 2007/0265220) have shown that the cleavability of a dsRNA species (specifically, a DsiRNA agent) by Dicer corresponds with increased potency and duration of action of the dsRNA species.

[0288] Certain preferred anti-EGFR DsiRNA agents were selected from a pre-screened population. Design of DsiRNAs can optionally involve use of predictive scoring algorithms that perform in silico assessments of the projected activity/efficacy of a number of possible DsiRNA agents spanning a region of sequence. Information regarding the design of such scoring algorithms can be found, e.g., in Gong et al. (BMC Bioinformatics 2006, 7:516), though a more recent “v3” algorithm represents a theoretically improved algorithm relative to siRNA scoring algorithms previously available in the art. (E.g., the “v3” and “v4” scoring algorithms are machine learning algorithms that are not reliant upon any biases in human sequence. In addition, the “v3” and “v4” algorithms derive from data sets that are many-fold larger than that from which an older “v2” algorithm such as that described in Gong et al. derives.)

[0289] The first and second oligonucleotides of the DsiRNA agents of the instant invention are not required to be completely complementary. In fact, in one embodiment, the 3′-terminus of the sense strand contains one or more mismatches. In one aspect, two mismatches are incorporated at the 3′ terminus of the sense strand. In another embodiment, the DsiRNA of the invention is a double stranded RNA molecule containing two RNA oligonucleotides each of which is 27 nucleotides in length and, when annealed to each other, have blunt ends and a two nucleotide mismatch on the 3′-terminus of the sense strand (the 5′-terminus of the antisense strand). The use of mismatches or decreased thermodynamic stability (specifically at the 3′-sense/5′-antisense position) has been proposed to facilitate or favor entry of the antisense strand into RISC (Schwarz et al., 2003, Cell 115: 199-208; Khvorova et al., 2003, Cell 115: 209-216), presumably by affecting some rate-limiting unwinding steps that occur with entry of the siRNA into RISC. Thus, terminal base composition has been included in design algorithms for selecting active 21mer siRNA duplexes (Ui-Tei et al., 2004, Nucleic Acids Res 32: 936-948; Reynolds et al., 2004, Nat Biotechnol 22: 326-330). With Dicer cleavage of the dsRNA of this embodiment, the small end-terminal sequence which contains the mismatches will either be left unpaired with the antisense strand (become part of a 3′-overhang) or be cleaved entirely off the final 21-mer siRNA. These “mismatches”, therefore, do not persist as mismatches in the final RNA component of RISC. The finding that base mismatches or destabilization of segments at the 3′-end of the sense strand of Dicer substrate improved the potency of synthetic duplexes in RNAi, presumably by facilitating processing by Dicer, was a surprising finding of past works describing the design and use of 25-30mer dsRNAs (also termed “DsiRNAs” herein; Rossi et al., U.S. Patent Application Nos. 2005/0277610, 2005/0244858 and 2007/0265220).

Modification of Anti-EGFR dsRNAs

[0290] One major factor that inhibits the effect of double stranded RNAs (“dsRNAs”) is the degradation of dsRNAs (e.g., siRNAs and DsiRNAs) by nucleases. A 3′-exonuclease is the primary nuclease activity present in serum and modification of the 3′-ends of antisense DNA oligonucleotides is crucial to prevent degradation (Eder et al., 1991, Antisense Res Dev, 1: 141-151). An RNase-T family nuclease has been identified called ERI-1 which has 3′ to 5′ exonuclease activity that is involved in regulation and degradation of siRNAs (Kennedy et al., 2004, Nature 427: 645-649; Hong et al., 2005, Biochem J, 390: 675-679). This gene is also known as Thex1 (NM_{—}02067) in mice or THEX1 (NM_{—}153332) in humans and is involved in degradation of histone mRNA; it also mediates degradation of 3′-overhangs in siRNAs, but does not degrade duplex RNA (Yang et al., 2006, J Biol Chem, 281: 30447-30454). It is therefore reasonable to expect that 3′-end-stabilization of dsRNAs, including the DsiRNAs of the instant invention, will improve stability.

[0291] XRN1 (NM_{—}019001) is a 5′ to 3′ exonuclease that resides in P-bodies and has been implicated in degradation of mRNA targeted by miRNA (Rehwinkel et al., 2005, RNA 11: 1640-1647) and may also be responsible for completing degradation initiated by internal cleavage as directed by a siRNA. XRN2 (NM_{—}012255) is a distinct 5′ to 3′ exonuclease that is involved in nuclear RNA processing.

[0292] RNase A is a major endonuclease activity in mammals that degrades RNAs. It is specific for ssRNA and cleaves at the 3′-end of pyrimidine bases. SiRNA degradation products consistent with RNase A cleavage can be detected by mass spectrometry after incubation in serum (Turner et al., 2007, Mol Biosyst 3: 43-50). The 3′-overhangs enhance the susceptibility of siRNAs to RNase degradation. Depletion of RNase A from serum reduces degradation of siRNAs; this degradation does show some sequence preference and is worse for sequences having poly A/U sequence on the ends (Haupenthal et al., 2006 Biochem Pharmacol 71: 702-710). This suggests the possibility that lower stability regions of the duplex may “breathe” and offer transient single-stranded species available for degradation by RNase A. RNase A inhibitors can be added to serum and improve siRNA longevity and potency (Haupenthal et al., 2007, Int J. Cancer 121: 206-210).

[0293] In 21mers, phosphorothioate or boranophosphate modifications directly stabilize the internucleoside phosphate linkage. Boranophosphate modified RNAs are highly nuclease resistant, potent as silencing agents, and are relatively non-toxic. Boranophosphate modified RNAs cannot be manufactured using standard chemical synthesis methods and instead are made by in vitro transcription (IVT) (Hall et al., 2004, Nucleic Acids Res 32: 5991-6000; Hall et al., 2006, Nucleic Acids Res 34: 2773-2781). Phosphorothioate (PS) modifications can be easily placed in the RNA duplex at any desired position and can be made using standard chemical synthesis methods. The PS modification shows dose-dependent toxicity, so most investigators have recommended limited incorporation in siRNAs, favoring the 3′-ends where protection from nucleases is most important (Harborth et al., 2003, Antisense Nucleic Acid Drug Dev 13: 83-105; Chiu and Rana, 2003, Mol Cell 10: 549-561; Braasch et al., 2003, Biochemistry 42: 7967-7975; Amarzguioui et al., 2003, Nucleic Acids Research 31: 589-595). More extensive PS modification can be compatible with potent RNAi activity; however, use of sugar modifications (such as 2′-O-methyl RNA) may be superior (Choung et al., 2006, Biochem Biophys Res Commun 342: 919-927).

[0294] A variety of substitutions can be placed at the 2′-position of the ribose which generally increases duplex stability (Tₘ) and can greatly improve nuclease resistance. 2′-O-methyl RNA is a naturally occurring modification found in mammalian ribosomal RNAs and transfer RNAs. 2′-O-methyl modification in siRNAs is known, but the precise position of modified bases within the duplex is important to retain potency and complete substitution of 2′-O-methyl RNA for RNA will inactivate the siRNA. For example, a pattern that employs alternating 2′-O-methyl bases can have potency equivalent to unmodified RNA and is quite stable in serum (Choung et al., 2006, Biochem Biophys Res Commun 342: 919-927; Czauderna et al., 2003, Nucleic Acids Research 31: 2705-2716).

[0295] The 2′-fluoro (2′-F) modification is also compatible with dsRNA (e.g., siRNA and DsiRNA) function; it is most commonly placed at pyrimidine sites (due to reagent cost and availability) and can be combined with 2′-O-methyl modification at purine positions; 2′-F purines are available and can also be used. Heavily modified duplexes of this kind can be potent triggers of RNAi in vitro (Allerson et al., 2005, J Med Chem 48: 901-904; Prakash et al., 2005, J Med Chem 48: 4247-4253; Kraynack and Baker, 2006, RNA 12: 163-176) and can improve performance and extend duration of action when used in vivo (Morrissey et al., 2005, Hepatology 41: 1349-1356; Morrissey et al., 2005, Nat Biotechnol 23: 1002-1007). A highly potent, nuclease stable, blunt 19mer duplex containing alternative 2′-F and 2′-O-Me bases is taught by Allerson. In this design, alternating 2′-O-Me residues are positioned in an identical pattern to that employed by Czauderna, however the remaining RNA residues are converted to 2′-F modified bases. A highly potent, nuclease resistant siRNA employed by Morrissey employed a highly potent, nuclease resistant siRNA in vivo. In addition to 2′-O-Me RNA and 2′-F RNA, this duplex includes DNA, RNA, inverted a basic residues, and a 3′-terminal PS internucleoside linkage. While extensive modification has certain benefits, more limited modification of the duplex can also improve in vivo performance and is both simpler and less costly to manufacture. Soutschek et al. (2004, Nature 432: 173-178) employed a duplex in vivo and was mostly RNA with two 2′-O-Me RNA bases and limited 3′-terminal PS internucleoside linkages.

[0296] Locked nucleic acids (LNAs) are a different class of 2′-modification that can be used to stabilize dsRNA (e.g., siRNA and DsiRNA). Patterns of LNA incorporation that retain potency are more restricted than 2′-O-methyl or 2′-F bases, so limited modification is preferred (Braasch et al., 2003, Biochemistry 42: 7967-7975; Grunweller et al., 2003, Nucleic Acids Res 31: 3185-3193; Elmen et al., 2005, Nucleic Acids Res 33: 439-447). Even with limited incorporation, the use of LNA modifications can improve dsRNA performance in vivo and may also alter or improve off target effect profiles (Mook et al., 2007, Mol Cancer Ther 6: 833-843).

[0297] Synthetic nucleic acids introduced into cells or live animals can be recognized as “foreign” and trigger an immune response Immune stimulation constitutes a major class of off-target effects which can dramatically change experimental results and even lead to cell death. The innate immune system includes a collection of receptor molecules that specifically interact with DNA and RNA that mediate these responses, some of which are located in the cytoplasm and some of which reside in endosomes (Marques and Williams, 2005, Nat Biotechnol 23: 1399-1405; Schlee et al., 2006, Mol Ther 14: 463-470). Delivery of siRNAs by cationic lipids or liposomes exposes the siRNA to both cytoplasmic and endosomal compartments, maximizing the risk for triggering a type 1 interferon (IFN) response both in vitro and in vivo (Morrissey et al., 2005, Nat Biotechnol 23: 1002-1007; Sioud and Sorensen, 2003, Biochem Biophys Res Commun 312: 1220-1225; Sioud, 2005, J Mol Biol 348: 1079-1090; Ma et al., 2005, Biochem Biophys Res Commun 330: 755-759). RNAs transcribed within the cell are less immunogenic (Robbins et al., 2006, Nat Biotechnol 24: 566-571) and synthetic RNAs that are immunogenic when delivered using lipid-based methods can evade immune stimulation when introduced unto cells by mechanical means, even in vivo (Heidel et al., 2004, Nat Biotechnol 22: 1579-1582). However, lipid based delivery methods are convenient, effective, and widely used. Some general strategy to prevent immune responses is needed, especially for in vivo application where all cell types are present and the risk of generating an immune response is highest. Use of chemically modified RNAs may solve most or even all of these problems.

[0298] In certain embodiments, modifications can be included in the anti-EGFR dsRNA agents of the present invention so long as the modification does not prevent the dsRNA agent from possessing EGFR inhibitory activity. In one embodiment, one or more modifications are made that enhance Dicer processing of the DsiRNA agent (an assay for determining Dicer processing of a DsiRNA is described elsewhere herein). In a second embodiment, one or more modifications are made that result in more effective EGFR inhibition (as described herein, EGFR inhibition/EGFR inhibitory activity of a dsRNA can be assayed via art-recognized methods for determining RNA levels, or for determining EGFR polypeptide levels, should such levels be assessed in lieu of or in addition to assessment of, e.g., EGFR mRNA levels). In a third embodiment, one or more modifications are made that support greater EGFR inhibitory activity (means of determining EGFR inhibitory activity are described supra). In a fourth embodiment, one or more modifications are made that result in greater potency of EGFR inhibitory activity per each dsRNA agent molecule to be delivered to the cell (potency of EGFR inhibitory activity is described supra). Modifications can be incorporated in the 3′-terminal region, the 5′-terminal region, in both the 3′-terminal and 5′-terminal region or in some instances in various positions within the sequence. With the restrictions noted above in mind, numbers and combinations of modifications can be incorporated into the dsRNA agent. Where multiple modifications are present, they may be the same or different. Modifications to bases, sugar moieties, the phosphate backbone, and their combinations are contemplated. Either 5′-terminus can be phosphorylated.

[0299] Examples of modifications contemplated for the phosphate backbone include phosphonates, including methylphosphonate, phosphorothioate, and phosphotriester modifications such as alkylphosphotriesters, and the like. Examples of modifications contemplated for the sugar moiety include 2′-alkyl pyrimidine, such as 2′-O-methyl, 2′-fluoro, amino, and deoxy modifications and the like (see, e.g., Amarzguioui et al., 2003, Nucleic Acids Research 31: 589-595). Examples of modifications contemplated for the base groups include a basic sugars, 2-O-alkyl modified pyrimidines, 4-thiouracil, 5-bromouracil, 5-iodouracil, and 5-(3-aminoallyl)-uracil and the like. Locked nucleic acids, or LNA's, could also be incorporated. Many other modifications are known and can be used so long as the above criteria are satisfied. Examples of modifications are also disclosed in U.S. Pat. Nos. 5,684,143, 5,858,988 and 6,291,438 and in U.S. published patent application No. 2004/0203145 A1. Other modifications are disclosed in Herdewijn (2000, Antisense Nucleic Acid Drug Dev 10: 297-310), Eckstein (2000, Antisense Nucleic Acid Drug Dev 10: 117-21), Rusckowski et al. (2000, Antisense Nucleic Acid Drug Dev 10: 333-345), Stein et al. (2001, Antisense Nucleic Acid Drug Dev 11: 317-25); Vorobjev et al. (2001, Antisense Nucleic Acid Drug Dev 11: 77-85).

[0300] One or more modifications contemplated can be incorporated into either strand. The placement of the modifications in the dsRNA agent can greatly affect the characteristics of the dsRNA agent, including conferring greater potency and stability, reducing toxicity, enhance Dicer processing, and minimizing an immune response. In one embodiment, the antisense strand or the sense strand or both strands have one or more 2′-O-methyl modified nucleotides. In another embodiment, the antisense strand contains 2′-O-methyl modified nucleotides. In another embodiment, the antisense stand contains a 3′ overhang that is comprised of 2′-O-methyl modified nucleotides. The antisense strand could also include additional 2′-O-methyl modified nucleotides.

[0301] In certain embodiments, the anti-EGFR DsiRNA agent of the invention has several properties which enhance its processing by Dicer. According to such embodiments, the DsiRNA agent has a length sufficient such that it is processed by Dicer to produce an siRNA and at least one of the following properties: (i) the DsiRNA agent is asymmetric, e.g., has a 3′ overhang on the sense strand and (ii) the DsiRNA agent has a modified 3′ end on the antisense strand to direct orientation of Dicer binding and processing of the dsRNA to an active siRNA. According to these embodiments, the longest strand in the DsiRNA agent comprises 25-30 nucleotides. In one embodiment, the sense strand comprises 25-30 nucleotides and the antisense strand comprises 25-28 nucleotides. Thus, the resulting dsRNA has an overhang on the 3′ end of the sense strand. The overhang is 1-4 nucleotides, such as 2 nucleotides. The antisense strand may also have a 5′ phosphate.

[0302] In certain embodiments, the sense strand of a DsiRNA agent is modified for Dicer processing by suitable modifiers located at the 3′ end of the sense strand, i.e., the DsiRNA agent is designed to direct orientation of Dicer binding and processing. Suitable modifiers include nucleotides such as deoxyribonucleotides, dideoxyribonucleotides, acyclonucleotides and the like and sterically hindered molecules, such as fluorescent molecules and the like. Acyclonucleotides substitute a 2-hydroxyethoxymethyl group for the 2′-deoxyribofuranosyl sugar normally present in dNMPs. Other nucleotide modifiers could include 3′-deoxyadenosine (cordycepin), 3′-azido-3′-deoxythymidine (AZT), 2′,3′-dideoxyinosine (ddI), 2′,3′-dideoxy-3′-thiacytidine (3TC), 2′,3′-didehydro-2′,3′-dideoxythymidine (d4T) and the monophosphate nucleotides of 3′-azido-3′-deoxythymidine (AZT), 2′,3′-dideoxy-3′-thiacytidine (3TC) and 2′,3′-didehydro-2′,3′-dideoxythymidine (d4T). In one embodiment, deoxynucleotides are used as the modifiers. When nucleotide modifiers are utilized, 1-3 nucleotide modifiers, or 2 nucleotide modifiers are substituted for the ribonucleotides on the 3′ end of the sense strand. When sterically hindered molecules are utilized, they are attached to the ribonucleotide at the 3′ end of the antisense strand. Thus, the length of the strand does not change with the incorporation of the modifiers. In another embodiment, the invention contemplates substituting two DNA bases in the dsRNA to direct the orientation of Dicer processing. In a further invention, two terminal DNA bases are located on the 3′ end of the sense strand in place of two ribonucleotides forming a blunt end of the duplex on the 5′ end of the antisense strand and the 3′ end of the sense strand, and a two-nucleotide RNA overhang is located on the 3′-end of the antisense strand. This is an asymmetric composition with DNA on the blunt end and RNA bases on the overhanging end.

[0303] In certain other embodiments, the antisense strand of a DsiRNA agent is modified for Dicer processing by suitable modifiers located at the 3′ end of the antisense strand, i.e., the DsiRNA agent is designed to direct orientation of Dicer binding and processing. Suitable modifiers include nucleotides such as deoxyribonucleotides, dideoxyribonucleotides, acyclonucleotides and the like and sterically hindered molecules, such as fluorescent molecules and the like. Acyclonucleotides substitute a 2-hydroxyethoxymethyl group for the 2′-deoxyribofuranosyl sugar normally present in dNMPs. Other nucleotide modifiers could include 3′-deoxyadenosine (cordycepin), 3′-azido-3′-deoxythymidine (AZT), 2′,3′-dideoxyinosine (ddI), 2′,3′-dideoxy-3′-thiacytidine (3TC), 2′,3′-didehydro-2′,3′-dideoxythymidine (d4T) and the monophosphate nucleotides of 3′-azido-3′-deoxythymidine (AZT), 2′,3′-dideoxy-3′-thiacytidine (3TC) and 2′,3′-didehydro-2′,3′-dideoxythymidine (d4T). In one embodiment, deoxynucleotides are used as the modifiers. When nucleotide modifiers are utilized, 1-3 nucleotide modifiers, or 2 nucleotide modifiers are substituted for the ribonucleotides on the 3′ end of the antisense strand. When sterically hindered molecules are utilized, they are attached to the ribonucleotide at the 3′ end of the antisense strand. Thus, the length of the strand does not change with the incorporation of the modifiers. In another embodiment, the invention contemplates substituting two DNA bases in the dsRNA to direct the orientation of Dicer processing. In a further invention, two terminal DNA bases are located on the 3′ end of the antisense strand in place of two ribonucleotides forming a blunt end of the duplex on the 5′ end of the sense strand and the 3′ end of the antisense strand, and a two-nucleotide RNA overhang is located on the 3′-end of the sense strand. This is also an asymmetric composition with DNA on the blunt end and RNA bases on the overhanging end.

[0304] The sense and antisense strands anneal under biological conditions, such as the conditions found in the cytoplasm of a cell. In addition, a region of one of the sequences, particularly of the antisense strand, of the dsRNA has a sequence length of at least 15 (in certain embodiments, 19 nucleotides) nucleotides, wherein these nucleotides are adjacent to the 3′ end of antisense strand and are sufficiently complementary to a nucleotide sequence of the target EGFR RNA.

[0305] Additionally, the DsiRNA agent structure can be optimized to ensure that the oligonucleotide segment generated from Dicer's cleavage will be the portion of the oligonucleotide that is most effective in inhibiting gene expression. For example, in one embodiment of the invention, a 27-bp oligonucleotide of the DsiRNA agent structure is synthesized wherein the anticipated 21 to 22-bp segment that will inhibit gene expression is located on the 3′-end of the antisense strand. The remaining bases located on the 5′-end of the antisense strand will be cleaved by Dicer and will be discarded. This cleaved portion can be homologous (i.e., based on the sequence of the target sequence) or non-homologous and added to extend the nucleic acid strand.

[0306] US 2007/0265220 discloses that 27mer DsiRNAs show improved stability in serum over comparable 21mer siRNA compositions, even absent chemical modification. Modifications of DsiRNA agents, such as inclusion of 2′-O-methyl RNA in the antisense strand, in patterns such as detailed above, when coupled with addition of a 5′ Phosphate, can improve stability of DsiRNA agents. Addition of 5′-phosphate to all strands in synthetic RNA duplexes may be an inexpensive and physiological method to confer some limited degree of nuclease stability.

[0307] The chemical modification patterns of the dsRNA agents of the instant invention are designed to enhance the efficacy of such agents. Accordingly, such modifications are designed to avoid reducing potency of dsRNA agents; to avoid interfering with Dicer processing of DsiRNA agents; to improve stability in biological fluids (reduce nuclease sensitivity) of dsRNA agents; or to block or evade detection by the innate immune system. Such modifications are also designed to avoid being toxic and to avoid increasing the cost or impact the ease of manufacturing the instant dsRNA agents of the invention.

[0308] In certain embodiments of the present invention, an anti-EGFR DsiRNA agent has one or more of the following properties: (i) the DsiRNA agent is asymmetric, e.g., has a 3′ overhang on the antisense strand and (ii) the DsiRNA agent has a modified 3′ end on the sense strand to direct orientation of Dicer binding and processing of the dsRNA to an active siRNA. According to this embodiment, the longest strand in the dsRNA comprises 25-35 nucleotides (e.g., 25, 26, 27, 28, 29, 30, 31, 32, 33, 34 or 35 nucleotides). In certain such embodiments, the DsiRNA agent is asymmetric such that the sense strand comprises 25-34 nucleotides and the 3′ end of the sense strand forms a blunt end with the 5′ end of the antisense strand while the antisense strand comprises 26-35 nucleotides and forms an overhang on the 3′ end of the antisense strand. In one embodiment, the DsiRNA agent is asymmetric such that the sense strand comprises 25-28 nucleotides and the antisense strand comprises 25-30 nucleotides. Thus, the resulting dsRNA has an overhang on the 3′ end of the antisense strand. The overhang is 1-4 nucleotides, for example 2 nucleotides. The sense strand may also have a 5′ phosphate.

[0309] The DsiRNA agent can also have one or more of the following additional properties: (a) the antisense strand has a right shift from the typical 21mer (e.g., the DsiRNA comprises a length of antisense strand nucleotides that extends to the 5′ of a projected Dicer cleavage site within the DsiRNA, with such antisense strand nucleotides base paired with corresponding nucleotides of the sense strand extending 3′ of a projected Dicer cleavage site in the sense strand), (b) the strands may not be completely complementary, i.e., the strands may contain simple mismatched base pairs (in certain embodiments, the DsiRNAs of the invention possess 1, 2, 3, 4 or even 5 or more mismatched base pairs, provided that EGFR inhibitory activity of the DsiRNA possessing mismatched base pairs is retained at sufficient levels (e.g., retains at least 50% EGFR inhibitory activity or more, at least 60% EGFR inhibitory activity or more, at least 70% EGFR inhibitory activity or more, at least 80% EGFR inhibitory activity or more, at least 90% EGFR inhibitory activity or more or at least 95% EGFR inhibitory activity or more as compared to a corresponding DsiRNA not possessing mismatched base pairs. In certain embodiments, mismatched base pairs exist between the antisense and sense strands of a DsiRNA. In some embodiments, mismatched base pairs exist (or are predicted to exist) between the antisense strand and the target RNA. In certain embodiments, the presence of a mismatched base pair(s) between an antisense strand residue and a corresponding residue within the target RNA that is located 3′ in the target RNA sequence of a projected Ago2 cleavage site retains and may even enhance EGFR inhibitory activity of a DsiRNA of the invention) and (c) base modifications such as locked nucleic acid(s) may be included in the 5′ end of the sense strand. A “typical” 21mer siRNA is designed using conventional techniques. In one technique, a variety of sites are commonly tested in parallel or pools containing several distinct siRNA duplexes specific to the same target with the hope that one of the reagents will be effective (Ji et al., 2003, FEBS Lett 552: 247-252). Other techniques use design rules and algorithms to increase the likelihood of obtaining active RNAi effector molecules (Schwarz et al., 2003, Cell 115: 199-208; Khvorova et al., 2003, Cell 115: 209-216; Ui-Tei et al., 2004, Nucleic Acids Res 32: 936-948; Reynolds et al., 2004, Nat Biotechnol 22: 326-330; Krol et al., 2004, J Biol Chem 279: 42230-42239; Yuan et al., 2004, Nucl Acids Res 32(Webserver issue):W130-134; Boese et al., 2005, Methods Enzymol 392: 73-96). High throughput selection of siRNA has also been developed (U.S. published patent application No. 2005/0042641 A1). Potential target sites can also be analyzed by secondary structure predictions (Heale et al., 2005, Nucleic Acids Res 33(3): e30). This 21mer is then used to design a right shift to include 3-9 additional nucleotides on the 5′ end of the 21mer. The sequence of these additional nucleotides is not restricted. In one embodiment, the added ribonucleotides are based on the sequence of the target gene. Even in this embodiment, full complementarity between the target sequence and the antisense siRNA is not required.

[0310] The first and second oligonucleotides of a DsiRNA agent of the instant invention are not required to be completely complementary. They only need to be sufficiently complementary to anneal under biological conditions and to provide a substrate for Dicer that produces a siRNA sufficiently complementary to the target sequence. Locked nucleic acids, or LNA's, are well known to a skilled artisan (Elmen et al., 2005, Nucleic Acids Res 33: 439-447; Kurreck et al., 2002, Nucleic Acids Res 30: 1911-1918; Crinelli et al., 2002, Nucleic Acids Res 30: 2435-2443; Braasch and Corey, 2001, Chem Biol 8: 1-7; Bondensgaard et al., 2000, Chemistry 6: 2687-2695; Wahlestedt et al., 2000, Proc Natl Acad Sci USA 97: 5633-5638). In one embodiment, an LNA is incorporated at the 5′ terminus of the sense strand. In another embodiment, an LNA is incorporated at the 5′ terminus of the sense strand in duplexes designed to include a 3′ overhang on the antisense strand.

[0311] In certain embodiments, the DsiRNA agent of the instant invention has an asymmetric structure, with the sense strand having a 25-base pair length, and the antisense strand having a 27-base pair length with a 2 base 3′-overhang. In other embodiments, this DsiRNA agent having an asymmetric structure further contains 2 deoxynucleotides at the 3′ end of the sense strand in place of two of the ribonucleotides.

[0312] Certain DsiRNA agent compositions containing two separate oligonucleotides can be linked by a third structure. The third structure will not block Dicer activity on the DsiRNA agent and will not interfere with the directed destruction of the RNA transcribed from the target gene. In one embodiment, the third structure may be a chemical linking group. Many suitable chemical linking groups are known in the art and can be used. Alternatively, the third structure may be an oligonucleotide that links the two oligonucleotides of the DsiRNA agent in a manner such that a hairpin structure is produced upon annealing of the two oligonucleotides making up the dsRNA composition. The hairpin structure will not block Dicer activity on the DsiRNA agent and will not interfere with the directed destruction of the EGFR RNA.

EGFR cDNA and Polypeptide Sequences

[0313] Known human and mouse EGFR cDNA and polypeptide sequences include the following: human wild-type Epidermal Growth Factor Receptor, transcript variant 1 (EGFR) cDNA sequences GenBank Accession No. NM_{—}005228.3; corresponding human EGFR polypeptide sequence GenBank Accession No. NP_{—}005219.2; mouse wild-type EGFR sequence GenBank Accession No. NM_{—}207655.2 (Mus musculus C57BL/6 EGFR transcript) and corresponding mouse EGFR polypeptide sequence GenBank Accession No. NP_{—}997538.1.

### EGFR Cell Biology and Clinical Therapeutics

[0314] EGFR (epidermal growth factor receptor) exists on the cell surface and is activated by binding of its specific ligands, including epidermal growth factor and transforming growth factor α (TGFα). ErbB2 has no known direct activating ligand, and may be in an activated state constitutively or become active upon heterodimerization with other family members such as EGFR. Upon activation by its growth factor ligands, EGFR undergoes a transition from an inactive monomeric form to an active homodimer—although there is some evidence that preformed inactive dimers may also exist before ligand binding. In addition to forming homodimers after ligand binding, EGFR may pair with another member of the ErbB receptor family, such as ErbB2/Her2/neu, to create an activated heterodimer. There is also evidence to suggest that clusters of activated EGFRs form, although it remains unclear whether this clustering is important for activation itself or occurs subsequent to activation of individual dimers.

[0315] EGFR dimerization stimulates its intrinsic intracellular protein-tyrosine kinase activity. As a result, autophosphorylation of several tyrosine (Y) residues in the C-terminal domain of EGFR occurs. These include Y992, Y1045, Y1068, Y1148 and Y1173 (Downward et al. Nature 311: 483-5). This autophosphorylation elicits downstream activation and signaling by several other proteins that associate with the phosphorylated tyrosines through their own phosphotyrosine-binding SH2 domains. These downstream signaling proteins initiate several signal transduction cascades, principally the MAPK, Akt and JNK pathways, leading to DNA synthesis and cell proliferation (Oda et al. Mol. Syst. Biol. 1: 2005). Such proteins modulate phenotypes such as cell migration, adhesion, and proliferation. Activation of the receptor is also important for the innate immune response in human skin (Sørensen et al. J Clin Invest. 116: 1878-1885). The kinase domain of EGFR can also cross-phosphorylate tyrosine residues of other receptors it is aggregated with, and can itself be activated in that manner.

[0316] Mutations that lead to EGFR overexpression (known as upregulation) or overactivity have been associated with a number of cancers, including lung cancer, anal cancers (Walker et al. Human Pathology 40: 1517-1527) and glioblastoma multiforme. In this latter case, a more or less specific mutation of EGFR, called EGFRvIII, is often observed (Kuan et al. Endocr. Relat. Cancer 8: 83-96). Mutations, amplifications or misregulations of EGFR or family members are implicated in about 30% of all epithelial cancers.

[0317] Mutations involving EGFR can produce constant activation, which can result in uncontrolled cell division—a predisposition for cancer (Lynch et al. N. Engl. J. Med. 350: 2129-39). Consequently, mutations of EGFR have been identified in several types of cancer, and it is the target of an expanding class of anticancer therapies (Zhang et al. J. Clin. Invest. 117: 2051-8), including, e.g., the molecules disclosed herein.

[0318] The identification of EGFR as an oncogene has led to the development of anticancer therapeutics directed against EGFR, including gefitinib (Paez et al. Science 304: 1497-500) and erlotinib for lung cancer, and cetuximab for colon cancer.

[0319] Many therapeutic approaches target EGFR. Cetuximab and panitumumab are examples of monoclonal antibody inhibitors. However, the former is of the IgG1 type, the latter of the IgG2 type; consequences on antibody-dependent cellular cytotoxicity can be quite different, depending on type of antibody administered (Yan and Beckman. BioTechniques 39: 565-8). Other monoclonals in clinical development are zalutumumab, nimotuzumab, and matuzumab. The above-referenced monoclonal antibodies block the extracellular ligand binding domain. With the binding site blocked, signal molecules can no longer attach there and activate the tyrosine kinase.

[0320] Another method is using small molecules to inhibit the EGFR tyrosine kinase, which is on the cytoplasmic side of the receptor. Without kinase activity, EGFR is unable to activate itself, which is a prerequisite for binding of downstream adaptor proteins. Ostensibly by halting the signaling cascade in cells that rely on this pathway for growth, tumor proliferation and migration is diminished. Gefitinib, erlotinib, and lapatinib (mixed EGFR and ERBB2 inhibitor) are examples of small molecule kinase inhibitors.

[0321] There are several quantitative methods available that use protein phosphorylation detection to identify EGFR family inhibitors (Olive DM. Expert Rev Proteomics 1: 327-41).

[0322] In recent clinical trials of EGFR-targeting therapeutics, subjects have been divided into EGFR positive and negative, based upon whether a tissue test shows a mutation. In such trials, EGFR positive patients have shown an impressive 60% response rate which exceeds the response rate for conventional chemotherapy (Jackman et al. Clin. Cancer Res. 15: 5267-73). However, many patients develop resistance to antibody and/or small molecule therapeutics. Two primary sources of resistance are the T790M Mutation and MET oncogene (Jackman et al. Clin. Cancer Res. 15: 5267-73). To date, there exists no consensus of an accepted approach to combat resistance, nor FDA approval of a specific combination.

In Vitro Assay to Assess dsRNA EGFR Inhibitory Activity

[0323] An in vitro assay that recapitulates RNAi in a cell-free system can be used to evaluate dsRNA constructs targeting EGFR RNA sequence(s), and thus to assess EGFR-specific gene inhibitory activity (also referred to herein as EGFR inhibitory activity) of a dsRNA. The assay comprises the system described by Tuschl et al., 1999, Genes and Development, 13, 3191-3197 and Zamore et al., 2000, Cell, 101, 25-33 adapted for use with dsRNA (e.g., DsiRNA) agents directed against EGFR RNA. A Drosophila extract derived from syncytial blastoderm is used to reconstitute RNAi activity in vitro. Target RNA is generated via in vitro transcription from a selected EGFR expressing plasmid using T7 RNA polymerase or via chemical synthesis. Sense and antisense dsRNA strands (for example, 20 uM each) are annealed by incubation in buffer (such as 100 mM potassium acetate, 30 mM HEPES-KOH, pH 7.4, 2 mM magnesium acetate) for 1 minute at 90° C. followed by 1 hour at 37° C., then diluted in lysis buffer (for example 100 mM potassium acetate, 30 mM HEPES-KOH at pH 7.4, 2 mM magnesium acetate). Annealing can be monitored by gel electrophoresis on an agarose gel in TBE buffer and stained with ethidium bromide. The Drosophila lysate is prepared using zero to two-hour-old embryos from Oregon R flies collected on yeasted molasses agar that are dechorionated and lysed. The lysate is centrifuged and the supernatant isolated. The assay comprises a reaction mixture containing 50% lysate [vol/vol], RNA (10-50 pM final concentration), and 10% [vol/vol] lysis buffer containing dsRNA (10 nM final concentration). The reaction mixture also contains 10 mM creatine phosphate, 10 ug/ml creatine phosphokinase, 100 um GTP, 100 uM UTP, 100 uM CTP, 500 uM ATP, 5 mM DTT, 0.1 U/uL RNasin (Promega), and 100 uM of each amino acid. The final concentration of potassium acetate is adjusted to 100 mM. The reactions are pre-assembled on ice and preincubated at 25° C. for 10 minutes before adding RNA, then incubated at 25° C. for an additional 60 minutes. Reactions are quenched with 4 volumes of 1.25×Passive Lysis Buffer (Promega). Target RNA cleavage is assayed by RT-PCR analysis or other methods known in the art and are compared to control reactions in which dsRNA is omitted from the reaction.

[0324] Alternately, internally-labeled target RNA for the assay is prepared by in vitro transcription in the presence of [α-³²P] CTP, passed over a G50 Sephadex column by spin chromatography and used as target RNA without further purification. Optionally, target RNA is 5′-³²P-end labeled using T4 polynucleotide kinase enzyme. Assays are performed as described above and target RNA and the specific RNA cleavage products generated by RNAi are visualized on an autoradiograph of a gel. The percentage of cleavage is determined by PHOSPHOR IMAGER® (autoradiography) quantitation of bands representing intact control RNA or RNA from control reactions without dsRNA and the cleavage products generated by the assay.

[0325] In one embodiment, this assay is used to determine target sites in the EGFR RNA target for dsRNA mediated RNAi cleavage, wherein a plurality of dsRNA constructs are screened for RNAi mediated cleavage of the EGFR RNA target, for example, by analyzing the assay reaction by electrophoresis of labeled target RNA, or by northern blotting, as well as by other methodology well known in the art.

[0326] In certain embodiments, a dsRNA of the invention is deemed to possess EGFR inhibitory activity if, e.g., a 50% reduction in EGFR RNA levels is observed in a system, cell, tissue or organism, relative to a suitable control. Additional metes and bounds for determination of EGFR inhibitory activity of a dsRNA of the invention are described supra.

Conjugation and Delivery of Anti-EGFR dsRNA Agents

[0327] In certain embodiments the present invention relates to a method for treating a subject having an EGFR-associated disease or disorder, or at risk of developing an EGFR-associated disease or disorder. In such embodiments, the dsRNA can act as novel therapeutic agents for controlling the EGFR-associated disease or disorder. The method comprises administering a pharmaceutical composition of the invention to the patient (e.g., human), such that the expression, level and/or activity of an EGFR RNA is reduced. The expression, level and/or activity of a polypeptide encoded by an EGFR RNA might also be reduced by a dsRNA of the instant invention, even where said dsRNA is directed against a non-coding region of the EGFR transcript (e.g., a targeted 5′ UTR or 3′ UTR sequence). Because of their high specificity, the dsRNAs of the present invention can specifically target EGFR sequences of cells and tissues, optionally in an allele-specific manner where polymorphic alleles exist within an individual and/or population.

[0328] In the treatment of an EGFR-associated disease or disorder, the dsRNA can be brought into contact with the cells or tissue of a subject, e.g., the cells or tissue of a subject exhibiting disregulation of EGFR and/or otherwise targeted for reduction of EGFR levels. For example, dsRNA substantially identical to all or part of an EGFR RNA sequence, may be brought into contact with or introduced into such a cell, either in vivo or in vitro. Similarly, dsRNA substantially identical to all or part of an EGFR RNA sequence may administered directly to a subject having or at risk of developing an EGFR-associated disease or disorder.

[0329] Therapeutic use of the dsRNA agents of the instant invention can involve use of formulations of dsRNA agents comprising multiple different dsRNA agent sequences. For example, two or more, three or more, four or more, five or more, etc. of the presently described agents can be combined to produce a formulation that, e.g., targets multiple different regions of the EGFR RNA, or that not only target EGFR RNA but also target, e.g., cellular target genes associated with an EGFR-associated disease or disorder. A dsRNA agent of the instant invention may also be constructed such that either strand of the dsRNA agent independently targets two or more regions of EGFR RNA, or such that one of the strands of the dsRNA agent targets a cellular target gene of EGFR known in the art.

[0330] Use of multifunctional dsRNA molecules that target more then one region of a target nucleic acid molecule can also provide potent inhibition of EGFR RNA levels and expression. For example, a single multifunctional dsRNA construct of the invention can target both the EGFR-1385 and EGFR-4012 sites simultaneously; additionally and/or alternatively, single or multifunctional agents of the invention can be designed to selectively target one splice variant of EGFR over another.

[0331] Thus, the dsRNA agents of the instant invention, individually, or in combination or in conjunction with other drugs, can be used to treat, inhibit, reduce, or prevent an EGFR-associated disease or disorder. For example, the dsRNA molecules can be administered to a subject or can be administered to other appropriate cells evident to those skilled in the art, individually or in combination with one or more drugs under conditions suitable for the treatment.

[0332] The dsRNA molecules also can be used in combination with other known treatments to treat, inhibit, reduce, or prevent an EGFR-associated disease or disorder in a subject or organism. For example, the described molecules could be used in combination with one or more known compounds, treatments, or procedures to treat, inhibit, reduce, or prevent an EGFR-associated disease or disorder in a subject or organism as are known in the art.

[0333] A dsRNA agent of the invention can be conjugated (e.g., at its 5′ or 3′ terminus of its sense or antisense strand) or unconjugated to another moiety (e.g. a non-nucleic acid moiety such as a peptide), an organic compound (e.g., a dye, cholesterol, or the like). Modifying dsRNA agents in this way may improve cellular uptake or enhance cellular targeting activities of the resulting dsRNA agent derivative as compared to the corresponding unconjugated dsRNA agent, are useful for tracing the dsRNA agent derivative in the cell, or improve the stability of the dsRNA agent derivative compared to the corresponding unconjugated dsRNA agent.

### Methods of Introducing Nucleic Acids, Vectors, and Host Cells

[0334] dsRNA agents of the invention may be directly introduced into a cell (i.e., intracellularly); or introduced extracellularly into a cavity, interstitial space, into the circulation of an organism, introduced orally, or may be introduced by bathing a cell or organism in a solution containing the nucleic acid. Vascular or extravascular circulation, the blood or lymph system, and the cerebrospinal fluid are sites where the nucleic acid may be introduced.

[0335] The dsRNA agents of the invention can be introduced using nucleic acid delivery methods known in art including injection of a solution containing the nucleic acid, bombardment by particles covered by the nucleic acid, soaking the cell or organism in a solution of the nucleic acid, or electroporation of cell membranes in the presence of the nucleic acid. Other methods known in the art for introducing nucleic acids to cells may be used, such as lipid-mediated carrier transport, chemical-mediated transport, and cationic liposome transfection such as calcium phosphate, and the like. The nucleic acid may be introduced along with other components that perform one or more of the following activities: enhance nucleic acid uptake by the cell or other-wise increase inhibition of the target EGFR RNA.

[0336] A cell having a target EGFR RNA may be from the germ line or somatic, totipotent or pluripotent, dividing or non-dividing, parenchyma or epithelium, immortalized or transformed, or the like. The cell may be a stem cell or a differentiated cell. Cell types that are differentiated include adipocytes, fibroblasts, myocytes, cardiomyocytes, endothelium, neurons, glia, blood cells, megakaryocytes, lymphocytes, macrophages, neutrophils, eosinophils, basophils, mast cells, leukocytes, granulocytes, keratinocytes, chondrocytes, osteoblasts, osteoclasts, hepatocytes, and cells of the endocrine or exocrine glands.

[0337] Depending on the particular target EGFR RNA sequence and the dose of dsRNA agent material delivered, this process may provide partial or complete loss of function for the EGFR RNA. A reduction or loss of RNA levels or expression (either EGFR RNA expression or encoded polypeptide expression) in at least 50%, 60%, 70%, 80%, 90%, 95% or 99% or more of targeted cells is exemplary Inhibition of EGFR RNA levels or expression refers to the absence (or observable decrease) in the level of EGFR RNA or EGFR RNA-encoded protein. Specificity refers to the ability to inhibit the EGFR RNA without manifest effects on other genes of the cell. The consequences of inhibition can be confirmed by examination of the outward properties of the cell or organism or by biochemical techniques such as RNA solution hybridization, nuclease protection, Northern hybridization, reverse transcription, gene expression monitoring with a microarray, antibody binding, enzyme linked immunosorbent assay (ELISA), Western blotting, radioimmunoassay (RIA), other immunoassays, and fluorescence activated cell analysis (FACS) Inhibition of target EGFR RNA sequence(s) by the dsRNA agents of the invention also can be measured based upon the effect of administration of such dsRNA agents upon development/progression of an EGFR-associated disease or disorder, e.g., tumor formation, growth, metastasis, etc., either in vivo or in vitro. Treatment and/or reductions in tumor or cancer cell levels can include halting or reduction of growth of tumor or cancer cell levels or reductions of, e.g., 10%, 20%, 30%, 40%, 50%, 60%, 70%, 80%, 90%, 95% or 99% or more, and can also be measured in logarithmic terms, e.g., 10-fold, 100-fold, 1000-fold, 10⁵-fold, 10⁶-fold, 10⁷-fold reduction in cancer cell levels could be achieved via administration of the dsRNA agents of the invention to cells, a tissue, or a subject.

[0338] For RNA-mediated inhibition in a cell line or whole organism, expression a reporter or drug resistance gene whose protein product is easily assayed can be measured. Such reporter genes include acetohydroxyacid synthase (AHAS), alkaline phosphatase (AP), beta galactosidase (LacZ), beta glucoronidase (GUS), chloramphenicol acetyltransferase (CAT), green fluorescent protein (GFP), horseradish peroxidase (HRP), luciferase (Luc), nopaline synthase (NOS), octopine synthase (OCS), and derivatives thereof. Multiple selectable markers are available that confer resistance to ampicillin, bleomycin, chloramphenicol, gentamycin, hygromycin, kanamycin, lincomycin, methotrexate, phosphinothricin, puromycin, and tetracyclin. Depending on the assay, quantitation of the amount of gene expression allows one to determine a degree of inhibition which is greater than 10%, 33%, 50%, 90%, 95% or 99% as compared to a cell not treated according to the present invention.

[0339] Lower doses of injected material and longer times after administration of RNA silencing agent may result in inhibition in a smaller fraction of cells (e.g., at least 10%, 20%, 50%, 75%, 90%, or 95% of targeted cells). Quantitation of gene expression in a cell may show similar amounts of inhibition at the level of accumulation of target EGFR RNA or translation of target protein. As an example, the efficiency of inhibition may be determined by assessing the amount of gene product in the cell; RNA may be detected with a hybridization probe having a nucleotide sequence outside the region used for the inhibitory dsRNA, or translated polypeptide may be detected with an antibody raised against the polypeptide sequence of that region.

[0340] The dsRNA agent may be introduced in an amount which allows delivery of at least one copy per cell. Higher doses (e.g., at least 5, 10, 100, 500 or 1000 copies per cell) of material may yield more effective inhibition; lower doses may also be useful for specific applications.

### Pharmaceutical Compositions

[0341] In certain embodiments, the present invention provides for a pharmaceutical composition comprising the dsRNA agent of the present invention. The dsRNA agent sample can be suitably formulated and introduced into the environment of the cell by any means that allows for a sufficient portion of the sample to enter the cell to induce gene silencing, if it is to occur. Many formulations for dsRNA are known in the art and can be used so long as the dsRNA gains entry to the target cells so that it can act. See, e.g., U.S. published patent application Nos. 2004/0203145 A1 and 2005/0054598 A1. For example, the dsRNA agent of the instant invention can be formulated in buffer solutions such as phosphate buffered saline solutions, liposomes, micellar structures, and capsids. Formulations of dsRNA agent with cationic lipids can be used to facilitate transfection of the dsRNA agent into cells. For example, cationic lipids, such as lipofectin (U.S. Pat. No. 5,705,188), cationic glycerol derivatives, and polycationic molecules, such as polylysine (published PCT International Application WO 97/30731), can be used. Suitable lipids include Oligofectamine, Lipofectamine (Life Technologies), NC388 (Ribozyme Pharmaceuticals, Inc., Boulder, Colo.), or FuGene 6 (Roche) all of which can be used according to the manufacturer's instructions.

[0342] Such compositions typically include the nucleic acid molecule and a pharmaceutically acceptable carrier. As used herein the language “pharmaceutically acceptable carrier” includes saline, solvents, dispersion media, coatings, antibacterial and antifungal agents, isotonic and absorption delaying agents, and the like, compatible with pharmaceutical administration. Supplementary active compounds can also be incorporated into the compositions.

[0343] A pharmaceutical composition is formulated to be compatible with its intended route of administration. Examples of routes of administration include parenteral, e.g., intravenous, intradermal, subcutaneous, oral (e.g., inhalation), transdermal (topical), transmucosal, and rectal administration. Solutions or suspensions used for parenteral, intradermal, or subcutaneous application can include the following components: a sterile diluent such as water for injection, saline solution, fixed oils, polyethylene glycols, glycerine, propylene glycol or other synthetic solvents; antibacterial agents such as benzyl alcohol or methyl parabens; antioxidants such as ascorbic acid or sodium bisulfite; cHeLating agents such as ethylenediaminetetraacetic acid; buffers such as acetates, citrates or phosphates and agents for the adjustment of tonicity such as sodium chloride or dextrose. pH can be adjusted with acids or bases, such as hydrochloric acid or sodium hydroxide. The parenteral preparation can be enclosed in ampoules, disposable syringes or multiple dose vials made of glass or plastic.

[0344] Pharmaceutical compositions suitable for injectable use include sterile aqueous solutions (where water soluble) or dispersions and sterile powders for the extemporaneous preparation of sterile injectable solutions or dispersion. For intravenous administration, suitable carriers include physiological saline, bacteriostatic water, Cremophor EL™ (BASF, Parsippany, N.J.) or phosphate buffered saline (PBS). In all cases, the composition must be sterile and should be fluid to the extent that easy syringability exists. It should be stable under the conditions of manufacture and storage and must be preserved against the contaminating action of microorganisms such as bacteria and fungi. The carrier can be a solvent or dispersion medium containing, for example, water, ethanol, polyol (for example, glycerol, propylene glycol, and liquid polyetheylene glycol, and the like), and suitable mixtures thereof. The proper fluidity can be maintained, for example, by the use of a coating such as lecithin, by the maintenance of the required particle size in the case of dispersion and by the use of surfactants. Prevention of the action of microorganisms can be achieved by various antibacterial and antifungal agents, for example, parabens, chlorobutanol, phenol, ascorbic acid, thimerosal, and the like. In many cases, it will be preferable to include isotonic agents, for example, sugars, polyalcohols such as manitol, sorbitol, sodium chloride in the composition. Prolonged absorption of the injectable compositions can be brought about by including in the composition an agent which delays absorption, for example, aluminum monostearate and gelatin.

[0345] Sterile injectable solutions can be prepared by incorporating the active compound in the required amount in a selected solvent with one or a combination of ingredients enumerated above, as required, followed by filtered sterilization. Generally, dispersions are prepared by incorporating the active compound into a sterile vehicle, which contains a basic dispersion medium and the required other ingredients from those enumerated above. In the case of sterile powders for the preparation of sterile injectable solutions, the preferred methods of preparation are vacuum drying and freeze-drying which yields a powder of the active ingredient plus any additional desired ingredient from a previously sterile-filtered solution thereof.

[0346] Oral compositions generally include an inert diluent or an edible carrier. For the purpose of oral therapeutic administration, the active compound can be incorporated with excipients and used in the form of tablets, troches, or capsules, e.g., gelatin capsules. Oral compositions can also be prepared using a fluid carrier for use as a mouthwash. Pharmaceutically compatible binding agents, and/or adjuvant materials can be included as part of the composition. The tablets, pills, capsules, troches and the like can contain any of the following ingredients, or compounds of a similar nature: a binder such as microcrystalline cellulose, gum tragacanth or gelatin; an excipient such as starch or lactose, a disintegrating agent such as alginic acid, Primogel, or corn starch; a lubricant such as magnesium stearate or Sterotes; a glidant such as colloidal silicon dioxide; a sweetening agent such as sucrose or saccharin; or a flavoring agent such as peppermint, methyl salicylate, or orange flavoring.

[0347] For administration by inhalation, the compounds are delivered in the form of an aerosol spray from pressured container or dispenser which contains a suitable propellant, e.g., a gas such as carbon dioxide, or a nebulizer. Such methods include those described in U.S. Pat. No. 6,468,798.

[0348] Systemic administration can also be by transmucosal or transdermal means. For transmucosal or transdermal administration, penetrants appropriate to the barrier to be permeated are used in the formulation. Such penetrants are generally known in the art, and include, for example, for transmucosal administration, detergents, bile salts, and fusidic acid derivatives. Transmucosal administration can be accomplished through the use of nasal sprays or suppositories. For transdermal administration, the active compounds are formulated into ointments, salves, gels, or creams as generally known in the art.

[0349] The compounds can also be prepared in the form of suppositories (e.g., with conventional suppository bases such as cocoa butter and other glycerides) or retention enemas for rectal delivery.

[0350] The compounds can also be administered by transfection or infection using methods known in the art, including but not limited to the methods described in McCaffrey et al. (2002), Nature, 418(6893), 38-9 (hydrodynamic transfection); Xia et al. (2002), Nature Biotechnol., 20(10), 1006-10 (viral-mediated delivery); or Putnam (1996), Am. J. Health Syst. Pharm. 53(2), 151-160, erratum at Am. J. Health Syst. Pharm. 53(3), 325 (1996).

[0351] The compounds can also be administered by a method suitable for administration of nucleic acid agents, such as a DNA vaccine. These methods include gene guns, bio injectors, and skin patches as well as needle-free methods such as the micro-particle DNA vaccine technology disclosed in U.S. Pat. No. 6,194,389, and the mammalian transdermal needle-free vaccination with powder-form vaccine as disclosed in U.S. Pat. No. 6,168,587. Additionally, intranasal delivery is possible, as described in, inter alia, Hamajima et al. (1998), Clin. Immunol. Immunopathol., 88(2), 205-10. Liposomes (e.g., as described in U.S. Pat. No. 6,472,375) and microencapsulation can also be used. Biodegradable targetable microparticle delivery systems can also be used (e.g., as described in U.S. Pat. No. 6,471,996).

[0352] In one embodiment, the active compounds are prepared with carriers that will protect the compound against rapid elimination from the body, such as a controlled release formulation, including implants and microencapsulated delivery systems. Biodegradable, biocompatible polymers can be used, such as ethylene vinyl acetate, polyanhydrides, polyglycolic acid, collagen, polyorthoesters, and polylactic acid. Such formulations can be prepared using standard techniques. The materials can also be obtained commercially from Alza Corporation and Nova Pharmaceuticals, Inc. Liposomal suspensions (including liposomes targeted to infected cells with monoclonal antibodies to viral antigens) can also be used as pharmaceutically acceptable carriers. These can be prepared according to methods known to those skilled in the art, for example, as described in U.S. Pat. No. 4,522,811.

[0353] Toxicity and therapeutic efficacy of such compounds can be determined by standard pharmaceutical procedures in cell cultures or experimental animals, e.g., for determining the LD₅₀ (the dose lethal to 50% of the population) and the ED₅₀ (the dose therapeutically effective in 50% of the population). The dose ratio between toxic and therapeutic effects is the therapeutic index and it can be expressed as the ratio LD₅₀/ED₅₀. Compounds which exhibit high therapeutic indices are preferred. While compounds that exhibit toxic side effects may be used, care should be taken to design a delivery system that targets such compounds to the site of affected tissue in order to minimize potential damage to uninfected cells and, thereby, reduce side effects.

[0354] The data obtained from the cell culture assays and animal studies can be used in formulating a range of dosage for use in humans. The dosage of such compounds lies preferably within a range of circulating concentrations that include the ED₅₀ with little or no toxicity. The dosage may vary within this range depending upon the dosage form employed and the route of administration utilized. For a compound used in the method of the invention, the therapeutically effective dose can be estimated initially from cell culture assays. A dose may be formulated in animal models to achieve a circulating plasma concentration range that includes the IC₅₀ (i.e., the concentration of the test compound which achieves a half-maximal inhibition of symptoms) as determined in cell culture. Such information can be used to more accurately determine useful doses in humans. Levels in plasma may be measured, for example, by high performance liquid chromatography.

[0355] As defined herein, a therapeutically effective amount of a nucleic acid molecule (i.e., an effective dosage) depends on the nucleic acid selected. For instance, single dose amounts of a dsRNA (or, e.g., a construct(s) encoding for such dsRNA) in the range of approximately 1 pg to 1000 mg may be administered; in some embodiments, 10, 30, 100, or 1000 pg, or 10, 30, 100, or 1000 ng, or 10, 30, 100, or 1000 μg, or 10, 30, 100, or 1000 mg may be administered. In some embodiments, 1-5 g of the compositions can be administered. The compositions can be administered one from one or more times per day to one or more times per week; including once every other day. The skilled artisan will appreciate that certain factors may influence the dosage and timing required to effectively treat a subject, including but not limited to the severity of the disease or disorder, previous treatments, the general health and/or age of the subject, and other diseases present. Moreover, treatment of a subject with a therapeutically effective amount of a nucleic acid (e.g., dsRNA), protein, polypeptide, or antibody can include a single treatment or, preferably, can include a series of treatments.

[0356] The nucleic acid molecules of the invention can be inserted into expression constructs, e.g., viral vectors, retroviral vectors, expression cassettes, or plasmid viral vectors, e.g., using methods known in the art, including but not limited to those described in Xia et al., (2002), supra. Expression constructs can be delivered to a subject by, for example, inhalation, orally, intravenous injection, local administration (see U.S. Pat. No. 5,328,470) or by stereotactic injection (see e.g., Chen et al. (1994), Proc. Natl. Acad. Sci. USA, 91, 3054-3057). The pharmaceutical preparation of the delivery vector can include the vector in an acceptable diluent, or can comprise a slow release matrix in which the delivery vehicle is imbedded. Alternatively, where the complete delivery vector can be produced intact from recombinant cells, e.g., retroviral vectors, the pharmaceutical preparation can include one or more cells which produce the gene delivery system.

[0357] The expression constructs may be constructs suitable for use in the appropriate expression system and include, but are not limited to retroviral vectors, linear expression cassettes, plasmids and viral or virally-derived vectors, as known in the art. Such expression constructs may include one or more inducible promoters, RNA Pol III promoter systems such as U6 snRNA promoters or H1 RNA polymerase III promoters, or other promoters known in the art. The constructs can include one or both strands of the siRNA. Expression constructs expressing both strands can also include loop structures linking both strands, or each strand can be separately transcribed from separate promoters within the same construct. Each strand can also be transcribed from a separate expression construct, e.g., Tuschl (2002, Nature Biotechnol 20: 500-505).

[0358] It can be appreciated that the method of introducing dsRNA agents into the environment of the cell will depend on the type of cell and the make up of its environment. For example, when the cells are found within a liquid, one preferable formulation is with a lipid formulation such as in lipofectamine and the dsRNA agents can be added directly to the liquid environment of the cells. Lipid formulations can also be administered to animals such as by intravenous, intramuscular, or intraperitoneal injection, or orally or by inhalation or other methods as are known in the art. When the formulation is suitable for administration into animals such as mammals and more specifically humans, the formulation is also pharmaceutically acceptable. Pharmaceutically acceptable formulations for administering oligonucleotides are known and can be used. In some instances, it may be preferable to formulate dsRNA agents in a buffer or saline solution and directly inject the formulated dsRNA agents into cells, as in studies with oocytes. The direct injection of dsRNA agent duplexes may also be done. For suitable methods of introducing dsRNA (e.g., DsiRNA agents), see U.S. published patent application No. 2004/0203145 A1.

[0359] Suitable amounts of a dsRNA agent must be introduced and these amounts can be empirically determined using standard methods. Typically, effective concentrations of individual dsRNA agent species in the environment of a cell will be 50 nanomolar or less, 10 nanomolar or less, or compositions in which concentrations of 1 nanomolar or less can be used. In another embodiment, methods utilizing a concentration of 200 picomolar or less, 100 picomolar or less, 50 picomolar or less, 20 picomolar or less, and even a concentration of 10 picomolar or less, 5 picomolar or less, 2 picomolar or less or 1 picomolar or less can be used in many circumstances.

[0360] The method can be carried out by addition of the dsRNA agent compositions to an extracellular matrix in which cells can live provided that the dsRNA agent composition is formulated so that a sufficient amount of the dsRNA agent can enter the cell to exert its effect. For example, the method is amenable for use with cells present in a liquid such as a liquid culture or cell growth media, in tissue explants, or in whole organisms, including animals, such as mammals and especially humans.

[0361] The level or activity of an EGFR RNA can be determined by a suitable method now known in the art or that is later developed. It can be appreciated that the method used to measure a target RNA and/or the expression of a target RNA can depend upon the nature of the target RNA. For example, where the target EGFR RNA sequence encodes a protein, the term “expression” can refer to a protein or the EGFR RNA/transcript derived from the EGFR gene (either genomic or of exogenous origin). In such instances the expression of the target EGFR RNA can be determined by measuring the amount of EGFR RNA/transcript directly or by measuring the amount of EGFR protein. Protein can be measured in protein assays such as by staining or immunoblotting or, if the protein catalyzes a reaction that can be measured, by measuring reaction rates. All such methods are known in the art and can be used. Where target EGFR RNA levels are to be measured, art-recognized methods for detecting RNA levels can be used (e.g., RT-PCR, Northern Blotting, etc.). In targeting EGFR RNAs with the dsRNA agents of the instant invention, it is also anticipated that measurement of the efficacy of a dsRNA agent in reducing levels of EGFR RNA or protein in a subject, tissue, in cells, either in vitro or in vivo, or in cell extracts can also be used to determine the extent of reduction of EGFR-associated phenotypes (e.g., disease or disorders, e.g., cancer or tumor formation, growth, metastasis, spread, etc.). The above measurements can be made on cells, cell extracts, tissues, tissue extracts or other suitable source material.

[0362] The determination of whether the expression of an EGFR RNA has been reduced can be by a suitable method that can reliably detect changes in RNA levels. Typically, the determination is made by introducing into the environment of a cell undigested dsRNA such that at least a portion of that dsRNA agent enters the cytoplasm, and then measuring the level of the target RNA. The same measurement is made on identical untreated cells and the results obtained from each measurement are compared.

[0363] The dsRNA agent can be formulated as a pharmaceutical composition which comprises a pharmacologically effective amount of a dsRNA agent and pharmaceutically acceptable carrier. A pharmacologically or therapeutically effective amount refers to that amount of a dsRNA agent effective to produce the intended pharmacological, therapeutic or preventive result. The phrases “pharmacologically effective amount” and “therapeutically effective amount” or simply “effective amount” refer to that amount of an RNA effective to produce the intended pharmacological, therapeutic or preventive result. For example, if a given clinical treatment is considered effective when there is at least a 20% reduction in a measurable parameter associated with a disease or disorder, a therapeutically effective amount of a drug for the treatment of that disease or disorder is the amount necessary to effect at least a 20% reduction in that parameter.

[0364] Suitably formulated pharmaceutical compositions of this invention can be administered by means known in the art such as by parenteral routes, including intravenous, intramuscular, intraperitoneal, subcutaneous, transdermal, airway (aerosol), rectal, vaginal and topical (including buccal and sublingual) administration. In some embodiments, the pharmaceutical compositions are administered by intravenous or intraparenteral infusion or injection.

[0365] In general, a suitable dosage unit of dsRNA will be in the range of 0.001 to 0.25 milligrams per kilogram body weight of the recipient per day, or in the range of 0.01 to 20 micrograms per kilogram body weight per day, or in the range of 0.001 to 5 micrograms per kilogram of body weight per day, or in the range of 1 to 500 nanograms per kilogram of body weight per day, or in the range of 0.01 to 10 micrograms per kilogram body weight per day, or in the range of 0.10 to 5 micrograms per kilogram body weight per day, or in the range of 0.1 to 2.5 micrograms per kilogram body weight per day. A pharmaceutical composition comprising the dsRNA can be administered once daily. However, the therapeutic agent may also be dosed in dosage units containing two, three, four, five, six or more sub-doses administered at appropriate intervals throughout the day. In that case, the dsRNA contained in each sub-dose must be correspondingly smaller in order to achieve the total daily dosage unit. The dosage unit can also be compounded for a single dose over several days, e.g., using a conventional sustained release formulation which provides sustained and consistent release of the dsRNA over a several day period. Sustained release formulations are well known in the art. In this embodiment, the dosage unit contains a corresponding multiple of the daily dose. Regardless of the formulation, the pharmaceutical composition must contain dsRNA in a quantity sufficient to inhibit expression of the target gene in the animal or human being treated. The composition can be compounded in such a way that the sum of the multiple units of dsRNA together contain a sufficient dose.

[0366] Data can be obtained from cell culture assays and animal studies to formulate a suitable dosage range for humans. The dosage of compositions of the invention lies within a range of circulating concentrations that include the ED₅₀ (as determined by known methods) with little or no toxicity. The dosage may vary within this range depending upon the dosage form employed and the route of administration utilized. For a compound used in the method of the invention, the therapeutically effective dose can be estimated initially from cell culture assays. A dose may be formulated in animal models to achieve a circulating plasma concentration range of the compound that includes the IC₅₀ (i.e., the concentration of the test compound which achieves a half-maximal inhibition of symptoms) as determined in cell culture. Such information can be used to more accurately determine useful doses in humans. Levels of dsRNA in plasma may be measured by standard methods, for example, by high performance liquid chromatography.

[0367] The pharmaceutical compositions can be included in a kit, container, pack, or dispenser together with instructions for administration.

### Methods of Treatment

[0368] The present invention provides for both prophylactic and therapeutic methods of treating a subject at risk of (or susceptible to) a disease or disorder caused, in whole or in part, by EGFR (e.g., misregulation and/or elevation of EGFR transcript and/or EGFR protein levels), or treatable via selective targeting of EGFR.

[0369] “Treatment”, or “treating” as used herein, is defined as the application or administration of a therapeutic agent (e.g., a dsRNA agent or vector or transgene encoding same) to a patient, or application or administration of a therapeutic agent to an isolated tissue or cell line from a patient, who has the disease or disorder, a symptom of disease or disorder or a predisposition toward a disease or disorder, with the purpose to cure, heal, alleviate, relieve, alter, remedy, ameliorate, improve or affect the disease or disorder, the symptoms of the disease or disorder, or the predisposition toward disease.

[0370] In one aspect, the invention provides a method for preventing in a subject, a disease or disorder as described above (including, e.g., prevention of the commencement of transforming events within a subject via inhibition of EGFR expression), by administering to the subject a therapeutic agent (e.g., a dsRNA agent or vector or transgene encoding same). Subjects at risk for the disease can be identified by, for example, one or a combination of diagnostic or prognostic assays as described herein. Administration of a prophylactic agent can occur prior to the detection of, e.g., cancer in a subject, or the manifestation of symptoms characteristic of the disease or disorder, such that the disease or disorder is prevented or, alternatively, delayed in its progression.

[0371] Another aspect of the invention pertains to methods of treating subjects therapeutically, i.e., altering the onset of symptoms of the disease or disorder. These methods can be performed in vitro (e.g., by culturing the cell with the dsRNA agent) or, alternatively, in vivo (e.g., by administering the dsRNA agent to a subject).

[0372] With regards to both prophylactic and therapeutic methods of treatment, such treatments may be specifically tailored or modified, based on knowledge obtained from the field of pharmacogenomics. “Pharmacogenomics”, as used herein, refers to the application of genomics technologies such as gene sequencing, statistical genetics, and gene expression analysis to drugs in clinical development and on the market. More specifically, the term refers the study of how a patient's genes determine his or her response to a drug (e.g., a patient's “drug response phenotype”, or “drug response genotype”). Thus, another aspect of the invention provides methods for tailoring an individual's prophylactic or therapeutic treatment with either the target EGFR RNA molecules of the present invention or target EGFR RNA modulators according to that individual's drug response genotype. Pharmacogenomics allows a clinician or physician to target prophylactic or therapeutic treatments to patients who will most benefit from the treatment and to avoid treatment of patients who will experience toxic drug-related side effects.

[0373] Therapeutic agents can be tested in a selected animal model. For example, a dsRNA agent (or expression vector or transgene encoding same) as described herein can be used in an animal model to determine the efficacy, toxicity, or side effects of treatment with said agent. Alternatively, an agent (e.g., a therapeutic agent) can be used in an animal model to determine the mechanism of action of such an agent.

Models Useful to Evaluate the Down-Regulation of EGFR mRNA Levels and Expression

### Cell Culture

[0374] The dsRNA agents of the invention can be tested for cleavage activity in vivo, for example, using the following procedure. The nucleotide sequences within the EGFR cDNA targeted by the dsRNA agents of the invention are shown in the above EGFR sequences.

[0375] The dsRNA reagents of the invention can be tested in cell culture using HeLa or other mammalian cells to determine the extent of EGFR RNA and EGFR protein inhibition. In certain embodiments, DsiRNA reagents (e.g., see FIG. 1, and above-recited structures) are selected against the EGFR target as described herein. EGFR RNA inhibition is measured after delivery of these reagents by a suitable transfection agent to, for example, cultured HeLa cells or other transformed or non-transformed mammalian cells in culture. Relative amounts of target EGFR RNA are measured versus actin or other appropriate control using real-time PCR monitoring of amplification (e.g., ABI 7700 TAQMAN®). A comparison is made to a mixture of oligonucleotide sequences made to unrelated targets or to a randomized DsiRNA control with the same overall length and chemistry, but randomly substituted at each position, or simply to appropriate vehicle-treated or untreated controls. Primary and secondary lead reagents are chosen for the target and optimization performed. After a transfection agent concentration is chosen, a RNA time-course of inhibition is performed with the lead DsiRNA molecule.

[0376] TAQMAN® (Real-Time PCR Monitoring of Amplification) and Lightcycler Quantification of mRNA

[0377] Total RNA is prepared from cells following DsiRNA delivery, for example, using Ambion Rnaqueous 4-PCR purification kit for large scale extractions, or Promega SV96 for 96-well assays. For Taqman analysis, dual-labeled probes are synthesized with, for example, the reporter dyes FAM or VIC covalently linked at the 5′-end and the quencher dye TAMEGFRA conjugated to the 3′-end. PCR amplifications are performed on, for example, an ABI PRISM 7700 Sequence detector using 50 uL reactions consisting of 10 uL total RNA, 100 nM forward primer, 100 mM reverse primer, 100 nM probe, 1xTaqMan PCR reaction buffer (PE-Applied Biosystems), 5.5 mM MgCl₂, 100 uM each dATP, dCTP, dGTP and dTTP, 0.2U RNase Inhibitor (Promega), 0.025U AmpliTaq Gold (PE-Applied Biosystems) and 0.2U M-MLV Reverse Transcriptase (Promega). The thermal cycling conditions can consist of 30 minutes at 48° C., 10 minutes at 95° C., followed by 40 cycles of 15 seconds at 95° C. and 1 minute at 60° C. Quantitation of target EGFR mRNA level is determined relative to standards generated from serially diluted total cellular RNA (300, 100, 30, 10 ng/r×n) and normalizing to, for example, 36B4 mRNA in either parallel or same tube TaqMan reactions.

[0378] Western Blotting

[0379] Cellular protein extracts can be prepared using a standard micro preparation technique (for example using RIPA buffer), or preferably, by extracting nuclear proteins by a method such as the NE-PER Nuclear and Cytoplasmic Extraction kit (Thermo-Fisher Scientific). Cellular protein extracts are run on 4-12% Tris-Glycine polyacrylamide gel and transferred onto membranes. Non-specific binding can be blocked by incubation, for example, with 5% non-fat milk for 1 hour followed by primary antibody for 16 hours at 4° C. Following washes, the secondary antibody is applied, for example (1:10,000 dilution) for 1 hour at room temperature and the signal detected on a VersaDoc imaging system

[0380] In several cell culture systems, cationic lipids have been shown to enhance the bioavailability of oligonucleotides to cells in culture (Bennet, et al., 1992, Mol. Pharmacology, 41, 1023-1033). In one embodiment, dsRNA molecules of the invention are complexed with cationic lipids for cell culture experiments. dsRNA and cationic lipid mixtures are prepared in serum-free OptimMEM (InVitrogen) immediately prior to addition to the cells. OptiMEM is warmed to room temperature (about 20-25° C.) and cationic lipid is added to the final desired concentration. dsRNA molecules are added to OptiMEM to the desired concentration and the solution is added to the diluted dsRNA and incubated for 15 minutes at room temperature. In dose response experiments, the RNA complex is serially diluted into OptiMEM prior to addition of the cationic lipid.

### Animal Models

[0381] The efficacy of anti-EGFR dsRNA agents may be evaluated in an animal model. Animal models of cancer and/or proliferative diseases, conditions, or disorders as are known in the art can be used for evaluation of the efficacy, potency, toxicity, etc. of anti-EGFR dsRNAs. Suitable animal models of proliferative disease include, e.g., transgenic rodents (e.g., mice, rats) bearing gain of function proto-oncogenes (e.g., Myc, Src) and/or loss of function of tumour suppressor proteins (e.g., p53, Rb) or rodents that have been exposed to radiation or chemical mutagens that induce DNA changes that facilitate neoplastic transformation. Many such animal models are commercially available, for example, from The Jackson Laboratory, Bar Harbor, Me., USA. These animal models may be used as a source cells or tissue for assays of the compositions of the invention. Such models can also be used or adapted for use for pre-clinical evaluation of the efficacy of dsRNA compositions of the invention in modulating EGFR gene expression toward therapeutic use.

[0382] As in cell culture models, the most EGFR relevant mouse tumor xenografts are those derived from cancer cells that express EGFR proteins. Xenograft mouse models of cancer relevant to study of the anti-tumor effect of modulating EGFR have been described by various groups (e.g., Thomson et al., Cancer Res 2005; 65: 9455; Wakeling et al., Cancer Res 2002; 62: 5749). Use of these models has demonstrated that inhibition of EGFR activity by anti-EGFR agents causes inhibition of tumor growth in animals.

[0383] Such models can be used in evaluating the efficacy of dsRNA molecules of the invention to inhibit EGFR activity, expression, tumor/cancer formation, growth, spread, development of other EGFR-associated phenotypes, diseases or disorders, etc. These models and others can similarly be used to evaluate the safety/toxicity and efficacy of dsRNA molecules of the invention in a pre-clinical setting.

[0384] Specific examples of animal model systems useful for evaluation of the EGFR-targeting dsRNAs of the invention include wild-type mice, and orthotopic or subcutaneous tumor model mice, such as those using xenografts of H292, HT29, A431, Du145, or H441 tumor cells. In an exemplary in vivo experiment, dsRNAs of the invention are tail vein injected into such mouse models at doses ranging from 1 to 10 mg/kg or, alternatively, repeated doses are administered at single-dose IC₅₀ levels, and organs (e.g., prostate, liver, kidney, lung, pancreas, colon, skin, spleen, bone marrow, lymph nodes, mammary fat pad, etc.) are harvested 24 hours after administration of the final dose. Such organs are then evaluated for mouse and/or human EGFR levels, depending upon the model used. Duration of action can also be examined at, e.g., 1, 4, 7, 14, 21 or more days after final dsRNA administration.

[0385] The practice of the present invention employs, unless otherwise indicated, conventional techniques of chemistry, molecular biology, microbiology, recombinant DNA, genetics, immunology, cell biology, cell culture and transgenic biology, which are within the skill of the art. See, e.g., Maniatis et al., 1982, Molecular Cloning (Cold Spring Harbor Laboratory Press, Cold Spring Harbor, N.Y.); Sambrook et al., 1989, Molecular Cloning, 2nd Ed. (Cold Spring Harbor Laboratory Press, Cold Spring Harbor, N.Y.); Sambrook and Russell, 2001, Molecular Cloning, 3rd Ed. (Cold Spring Harbor Laboratory Press, Cold Spring Harbor, N.Y.); Ausubel et al., 1992), Current Protocols in Molecular Biology (John Wiley & Sons, including periodic updates); Glover, 1985, DNA Cloning (IRL Press, Oxford); Anand, 1992; Guthrie and Fink, 1991; Harlow and Lane, 1988, Antibodies, (Cold Spring Harbor Laboratory Press, Cold Spring Harbor, N.Y.); Jakoby and Pastan, 1979; Nucleic Acid Hybridization (B. D. Hames & S. J. Higgins eds. 1984); Transcription And Translation (B. D. Hames & S. J. Higgins eds. 1984); Culture Of Animal Cells (R. I. Freshney, Alan R. Liss, Inc., 1987); Immobilized Cells And Enzymes (IRL Press, 1986); B. Perbal, A Practical Guide To Molecular Cloning (1984); the treatise, Methods In Enzymology (Academic Press, Inc., N.Y.); Gene Transfer Vectors For Mammalian Cells (J. H. Miller and M. P. Calos eds., 1987, Cold Spring Harbor Laboratory); Methods In Enzymology, Vols. 154 and 155 (Wu et al. eds.), Immunochemical Methods In Cell And Molecular Biology (Mayer and Walker, eds., Academic Press, London, 1987); Handbook Of Experimental Immunology, Volumes I-IV (D. M. Weir and C. C. Blackwell, eds., 1986); Riott, Essential Immunology, 6th Edition, Blackwell Scientific Publications, Oxford, 1988; Hogan et al., Manipulating the Mouse Embryo, (Cold Spring Harbor Laboratory Press, Cold Spring Harbor, N.Y., 1986); Westerfield, M., The zebrafish book. A guide for the laboratory use of zebrafish (Danio rerio), (4th Ed., Univ. of Oregon Press, Eugene, 2000).

[0386] Unless otherwise defined, all technical and scientific terms used herein have the same meaning as commonly understood by one of ordinary skill in the art to which this invention belongs. Although methods and materials similar or equivalent to those described herein can be used in the practice or testing of the present invention, suitable methods and materials are described below. All publications, patent applications, patents, and other references mentioned herein are incorporated by reference in their entirety. In case of conflict, the present specification, including definitions, will control. In addition, the materials, methods, and examples are illustrative only and not intended to be limiting.

### EXAMPLES

[0387] The present invention is described by reference to the following Examples, which are offered by way of illustration and are not intended to limit the invention in any manner. Standard techniques well known in the art or the techniques specifically described below were utilized.

### Example 1

### Preparation of Double-Stranded RNA Oligonucleotides

[0388] Oligonucleotide Synthesis and Purification

[0389] DsiRNA molecules can be designed to interact with various sites in the RNA message, for example, target sequences within the RNA sequences described herein. In presently exemplified agents, 260 human target EGFR sequences and 96 mouse target EGFR sequences were selected for evaluation (136 of the 260 human target EGFR sites were predicted to be conserved with corresponding sites in the mouse EGFR transcript sequence). The sequences of one strand of the DsiRNA molecules were complementary to the target EGFR site sequences described above. The DsiRNA molecules were chemically synthesized using methods described herein. Generally, DsiRNA constructs were synthesized using solid phase oligonucleotide synthesis methods as described for 19-23mer siRNAs (see for example Usman et al., U.S. Pat. Nos. 5,804,683; 5,831,071; 5,998,203; 6,117,657; 6,353,098; 6,362,323; 6,437,117; 6,469,158; Scaringe et al., U.S. Pat. Nos. 6,111,086; 6,008,400; 6,111,086).

[0390] Individual RNA strands were synthesized and HPLC purified according to standard methods (Integrated DNA Technologies, Coralville, Iowa). For example, RNA oligonucleotides were synthesized using solid phase phosphoramidite chemistry, deprotected and desalted on NAP-5 columns (Amersham Pharmacia Biotech, Piscataway, N.J.) using standard techniques (Damha and Olgivie, 1993, Methods Mol Biol 20: 81-114; Wincott et al., 1995, Nucleic Acids Res 23: 2677-84). The oligomers were purified using ion-exchange high performance liquid chromatography (IE-HPLC) on an Amersham Source 15Q column (1.0 cm×25 cm; Amersham Pharmacia Biotech, Piscataway, N.J.) using a 15 mM step-linear gradient. The gradient varies from 90:10 Buffers A:B to 52:48 Buffers A:B, where Buffer A is 100 mM Tris pH 8.5 and Buffer B is 100 mM Tris pH 8.5, 1 M NaCl. Samples were monitored at 260 nm and peaks corresponding to the full-length oligonucleotide species are collected, pooled, desalted on NAP-5 columns, and lyophilized.

[0391] The purity of each oligomer was determined by capillary electrophoresis (CE) on a Beckman PACE 5000 (Beckman Coulter, Inc., Fullerton, Calif.). The CE capillaries had a 100 μm inner diameter and contains ssDNA 100R Gel (Beckman-Coulter). Typically, about 0.6 nmole of oligonucleotide was injected into a capillary, run in an electric field of 444 V/cm and detected by UV absorbance at 260 nm. Denaturing Tris-Borate-7 M-urea running buffer was purchased from Beckman-Coulter. Oligoribonucleotides were obtained that are at least 90% pure as assessed by CE for use in experiments described below. Compound identity was verified by matrix-assisted laser desorption ionization time-of-flight (MALDI-TOF) mass spectroscopy on a Voyager DE™ Biospectometry Work Station (Applied Biosystems, Foster City, Calif.) following the manufacturer's recommended protocol. Relative molecular masses of all oligomers were obtained, often within 0.2% of expected molecular mass.

[0392] Preparation of Duplexes

[0393] Single-stranded RNA (ssRNA) oligomers were resuspended, e.g., at 100 μM concentration in duplex buffer consisting of 100 mM potassium acetate, 30 mM HEPES, pH 7.5. Complementary sense and antisense strands were mixed in equal molar amounts to yield a final solution of, e.g., 50 μM duplex. Samples were heated to 100° C. for 5′ in RNA buffer (IDT) and allowed to cool to room temperature before use. Double-stranded RNA (dsRNA) oligomers were stored at −20° C. Single-stranded RNA oligomers were stored lyophilized or in nuclease-free water at −80° C.

[0394] Nomenclature

[0395] For consistency, the following nomenclature has been employed in the instant specification. Names given to duplexes indicate the length of the oligomers and the presence or absence of overhangs. A “ 25/27” is an asymmetric duplex having a 25 base sense strand and a 27 base antisense strand with a 2-base 3′-overhang. A “ 27/25” is an asymmetric duplex having a 27 base sense strand and a 25 base antisense strand.

[0396] Cell Culture and RNA Transfection

[0397] HeLa cells were obtained from ATCC and maintained in DMEM (HyClone) supplemented with 10% fetal bovine serum (HyClone) at 37° C. under 5% CO₂. HEPA1-6 cells were obtained from ATCC and maintained in DMEM (HyClone) supplemented with 10% fetal bovine serum (HyClone) at 37° C. under 5% CO₂. For RNA transfections, cells were transfected with DsiRNAs as indicated at a final concentration of 1 nM, 0.3 nM or 0.1 nM using Lipofectamine™ RNAiMAX (Invitrogen) and following manufacturer's instructions. Briefly, for 0.1 nM transfections, e.g., of Example 3 below, an aliquot of stock solution of each DsiRNA was mixed with Opti-MEM I (Invitrogen) and Lipofectamine™ RNAiMAX to reach a volume of 200 μL. The resulting 200 μL mix was added per well into duplicate individual wells of 24 well plates and incubated for 20 min at RT to allow DsiRNA:Lipofectamine™ RNAiMAX complexes to form. Meanwhile, target cells were trypsinized and resuspended in medium. Finally, 300 μL of the cell suspension were added to each well (final volume 500 μL) and plates were placed into the incubator for 24 hours.

[0398] Assessment of EGFR Inhibition

[0399] EGFR target gene knockdown was determined by qRT-PCR, with values normalized to HPRT and SFRS9 housekeeping genes, and to transfections with control DsiRNAs and/or mock transfection controls.

[0400] RNA Isolation and Analysis

[0401] Media was aspirated, and total RNA was extracted using the SV96 kit (Promega). Approximately 100 ng of total RNA was reverse-transcribed using SuperscriptII, Oligo dT, and random hexamers following manufacturer's instructions. Typically, one-sixth of the resulting cDNA was analyzed by qPCR using primers and probes specific for both the EGFR gene and for the human genes HPRT-1 and SFRS9. An ABI 7700 was used for the amplification reactions. Each sample was tested in triplicate. Relative EGFR RNA levels were normalized to HPRT1 and SFRS9 RNA levels and compared with RNA levels obtained in mock transfection control samples. Typically, one-fifteenth of the resulting cDNA was analyzed by qPCR using primers and probes specific for both the EGFR gene and for the human gene HPRT-1 or SFRS9. A Bio-Rad CFX96 was used for the amplification reactions. Each sample was tested in duplicate. Relative EGFR RNA levels were normalized to HPRT1 or SFRS9 RNA levels and compared with RNA levels obtained in mock transfection control samples.

[0402] Dose-Response Curves

[0403] NCI-H1975 cells were transfected in vitro, using lipid transfection reagent RNAiMAX, with a dose curve of the EGFR DsiRNAs derived via screening (or mock treated, without DsiRNA). One day post-transfection, lysates were made from the cells and total RNA was extracted using an SV 96 Total RNA Isolation System obtained from Promega. cDNA was made using a Roche Transcriptor First Strand cDNA Synthesis Kit (using Random Primers). qPCR was performed using BIO-RAD iQ Multiplex Powermix and primer probe sets for the EGFR gene and for the normalization gene SFRS9. Knockdown was determined relative to mock treatments, and data were analyzed using Prism software to determine IC50 values for each DsiRNA.

[0404] Assessment Of Cell Growth Inhibition

[0405] NCI-H1975 cells were transfected in vitro, lipid transfection reagent RNAiMAX, with EGFR DsiRNAs derived from screening (or transfected with a control nonspecific DsiRNA, or mock treated, without DsiRNA). From one set of transfected cells, two days post-transfection, lysates were made from the cells and total RNA was extracted using a Promega SV 96 Total RNA Isolation System. cDNA was made using a Roche Transcriptor First Strand cDNA Synthesis Kit (using Random Primer). qPCR was performed with BIO-RAD iQ Multiplex Powermix and primer probe sets for the EGFR gene and for the normalization gene SFRS9. Knockdown was determined relative to mock treatments. A second identical set of transfected cells were analyzed for cumulative cell growth five days after transfection, using a Promega Cell Titer Blue assay.

### Example 2

### DsiRNA Inhibition of EGFR—Primary Screen

[0406] DsiRNA molecules targeting EGFR were designed and synthesized as described above and tested in HeLa cells for inhibitory efficacy. For transfection, annealed DsiRNAs were mixed with the transfection reagent (Lipofectamine™ RNAiMAX, Invitrogen) in a volume of 50 μl/well and incubated for 20 minutes at room temperature. The HeLa (human) or HEPA1-6 (mouse) cells were trypsinized, resuspended in media, and added to wells (100 uL per well) to give a final DsiRNA concentration of 1 nM in a volume of 150 μl. Each DsiRNA transfection mixture was added to 3 wells for triplicate DsiRNA treatments. Cells were incubated at 37° C. for 24 hours in the continued presence of the DsiRNA transfection mixture. At 24 hours, RNA was prepared from each well of treated cells. The supernatants with the transfection mixtures were first removed and discarded, then the cells were lysed and RNA prepared from each well. Target EGFR RNA levels following treatment were evaluated by qRT-PCR for the EGFR target gene, with values normalized to those obtained for controls. Triplicate data was averaged and the % error determined for each treatment. Normalized data were graphed and the reduction of target mRNA by active DsiRNAs in comparison to controls was determined.

[0407] EGFR targeting DsiRNAs examined for EGFR inhibitory efficacy in a primary phase of testing are indicated in Tables 2 and 4 above, with results of such assays shown in FIGS. 2A-2D and in Tables 11 and 12 below. In this example, 356 asymmetric DsiRNAs (tested DsiRNAs possessed a 25/27mer structure) were constructed and tested for EGFR inhibitory efficacy in human HeLa and mouse HEPA1-6 cells incubated in the presence of such DsiRNAs at a concentration of 1 nM. The 356 asymmetric DsiRNAs tested included DsiRNAs selected from Tables 2 and 4 above, where sequences and structures of these tested asymmetric DsiRNAs are shown (in above Tables 2 and 4, underlined nucleotide residues indicate 2′-O-methyl modified residues, ribonucleotide residues are shown as UPPER CASE, and deoxyribonucleotide residues are shown as lower case).

[0408] Assay of the 356 EGFR targeting DsiRNAs in human HeLa and mouse HEPA1-6 cells at 1 nM revealed the following EGFR inhibitory efficacies, presented in Tables 11 and 12. EGFR levels were determined using qPCR assays positioned at indicated locations within the EGFR transcript (for human HeLa cell experiments, paired qPCR assays were performed and are indicated as “Hs EGFR 1068-1232” (FAM) and “Hs EGFR 4704-4789” (Yakima Yellow); for mouse HEPA1-6 cell experiments, paired qPCR assays were performed and are indicated as “Mm EGFR 1955-2098” (Yakima Yellow) and “Mm EGFR 3602-3699” (FAM)).

TABLE 11
EGFR Inhibitory Efficacy of DsiRNAs
Assayed at 1 nM in Human HeLa Cells

| DsiRNA | | | |
|---|---|---|---|
| Name | | | |
| (Human | Mouse | % Remaining EGFR | % Remaining EGFR |
| EGFR | EGFR | mRNA ± % | mRNA ± % |
| Target | Target | Error (Assay: | Error (Assay: |
| Location) | Location | Hs EGFR 1068-1232) | Hs EGFR 4704-4789) |
| EGFR-31 | N/A | 170.2 ± 15.6 | 151.5 ± 12.6 |
| EGFR-32 | N/A | 116.6 ± 3.8 | 97.6 ± 3.3 |
| EGFR-34 | N/A | 111.8 ± 3.8 | 97.5 ± 5.9 |
| EGFR-298 | N/A | 136.4 ± 3.9 | 133.6 ± 3.1 |
| EGFR-300 | N/A | 77.8 ± 17.6 | 77.4 ± 8.5 |
| EGFR-302 | N/A | 117.8 ± 8.8 | 106.4 ± 7.3 |
| EGFR-390 | N/A | 19.8 ± 14 | 18 ± 9.2 |
| EGFR-458 | N/A | 15.8 ± 16 | 14.6 ± 5.2 |
| EGFR-463 | 497 | 67.6 ± 20.3 | 65.5 ± 3.7 |
| EGFR-464 | 498 | 23.1 ± 12.3 | 21.4 ± 4.2 |
| EGFR-489 | N/A | 32.5 ± 10.6 | 27.4 ± 9.8 |
| EGFR-496 | 530 | 51 ± 8.7 | 46.7 ± 4.7 |
| EGFR-497 | 531 | 49 ± 7.2 | 58.7 ± 5.3 |
| EGFR-498 | 532 | 147.5 ± 15.8 | 128.7 ± 16.9 |
| EGFR-499 | 533 | 48.6 ± 13.4 | 59.2 ± 16.3 |
| EGFR-500 | 534 | 72.6 ± 17.1 | 77.7 ± 10.2 |
| EGFR-501 | 535 | 122 ± 2.5 | 92.3 ± 5.9 |
| EGFR-502 | 536 | 142.8 ± 3.6 | 114.8 ± 3.5 |
| EGFR-503 | 537 | 82.4 ± 11.6 | 79.4 ± 5.7 |
| EGFR-504 | 538 | 70.3 ± 6.2 | 75.9 ± 5 |
| EGFR-505 | 539 | 71.5 ± 5.7 | 73.7 ± 7.7 |
| EGFR-506 | 540 | 96.7 ± 13.1 | 95.2 ± 10.4 |
| EGFR-507 | 541 | 45.3 ± 2.1 | 52.1 ± 2.2 |
| EGFR-508 | 542 | 71.5 ± 18.3 | 71.5 ± 12.9 |
| EGFR-509 | 543 | 32.7 ± 6.9 | 25.3 ± 6.1 |
| EGFR-525 | N/A | 21.6 ± 19.6 | 19.5 ± 3.2 |
| EGFR-676 | N/A | 27.9 ± 13.3 | 23.8 ± 12.4 |
| EGFR-701 | N/A | 47.4 ± 6.8 | 34.3 ± 6.3 |
| EGFR-707 | N/A | 26 ± 5.7 | 29.5 ± 1.6 |
| EGFR-707 | N/A | 30.8 ± 4.9 | 22.6 ± 7.8 |
| EGFR-709 | N/A | 39.7 ± 6.6 | 35.5 ± 8.5 |
| EGFR-710 | N/A | 47.4 ± 14.6 | 39.8 ± 9.5 |
| EGFR-827 | N/A | 22.4 ± 6 | 26.6 ± 4.9 |
| EGFR-838 | 872 | 86.3 ± 14 | 85.9 ± 10.1 |
| EGFR-839 | 873 | 58.2 ± 8.2 | 58.1 ± 8.4 |
| EGFR-840 | 874 | 56.7 ± 9.6 | 62.2 ± 6 |
| EGFR-841 | 875 | 57.4 ± 11 | 63.4 ± 8.9 |
| EGFR-842 | 876 | 59.6 ± 20.1 | 60.5 ± 11 |
| EGFR-876 | 910 | 19.5 ± 15.7 | 20.5 ± 11.2 |
| EGFR-877 | 911 | 15.7 ± 35.7 | 18.3 ± 13.9 |
| EGFR-878 | 912 | 20.8 ± 8.5 | 18.3 ± 3.8 |
| EGFR-879 | 913 | 58.2 ± 9.7 | 42.7 ± 8.1 |
| EGFR-899 | 933 | 121.8 ± 14.2 | 103.9 ± 13.4 |
| EGFR-900 | 934 | 81.4 ± 7.7 | 70.4 ± 7.5 |
| EGFR-901 | 935 | 89.5 ± 5.1 | 70.4 ± 4.4 |
| EGFR-902 | 936 | 88.9 ± 15.1 | 61.9 ± 12.4 |
| EGFR-903 | 937 | 71.6 ± 18.3 | 69 ± 9.5 |
| EGFR-904 | 938 | 92.6 ± 17.1 | 77.5 ± 20.3 |
| EGFR-905 | 939 | 132.4 ± 9.6 | 97.5 ± 4.4 |
| EGFR-912 | N/A | 63.7 ± 25.8 | 69.5 ± 22.2 |
| EGFR-914 | N/A | 159.5 ± 19.7 | 120.9 ± 16.3 |
| EGFR-926 | N/A | 95.8 ± 8.7 | 100.3 ± 10.1 |
| EGFR-954 | 988 | 122 ± 14.2 | 93.6 ± 4.7 |
| EGFR-955 | 989 | 61.8 ± 4.9 | 48.1 ± 9.4 |
| EGFR-956 | 990 | 90.2 ± 15 | 67.6 ± 11.6 |
| EGFR-1005 | N/A | 130.7 ± 6.3 | 56.3 ± 5.2 |
| EGFR-1013 | N/A | 21.5 ± 7.3 | 32.2 ± 14.8 |
| EGFR-1175 | N/A | 136.5 ± 6.1 | 130.4 ± 7.7 |
| EGFR-1271 | N/A | 11.4 ± 16.8 | 12.6 ± 6.4 |
| EGFR-1286 | N/A | 19.4 ± 3.4 | 21.9 ± 5 |
| EGFR-1313 | 1347 | 11.5 ± 9.3 | 11.5 ± 10 |
| EGFR-1330 | N/A | 9.2 ± 5.6 | 12.6 ± 3.7 |
| EGFR-1437 | N/A | 32.2 ± 22.6 | 32 ± 15.7 |
| EGFR-1475 | N/A | 59.1 ± 8 | 57.5 ± 8 |
| EGFR-1480 | 1514 | 105.7 ± 22.3 | 82.5 ± 21 |
| EGFR-1481 | 1515 | 98.2 ± 14.8 | 84.9 ± 13.8 |
| EGFR-1482 | 1516 | 97.7 ± 9.7 | 81.7 ± 5.6 |
| EGFR-1483 | 1517 | 152.6 ± 8.8 | 100.6 ± 4.5 |
| EGFR-1484 | 1518 | 151.4 ± 18.4 | 125.7 ± 19.7 |
| EGFR-1485 | 1519 | 103 ± 7 | 91.2 ± 6.7 |
| EGFR-1486 | 1520 | 97.2 ± 6.7 | 76.2 ± 3.7 |
| EGFR-1487 | 1521 | 81.4 ± 19.9 | 60.4 ± 13.2 |
| EGFR-1561 | 1595 | 36.9 ± 11.2 | 25.2 ± 11.1 |
| EGFR-1562 | 1596 | 25.9 ± 4.5 | 16.2 ± 4.7 |
| EGFR-1563 | 1597 | 15.9 ± 8.3 | 11.1 ± 8.3 |
| EGFR-1661 | N/A | 54.4 ± 4.4 | 43.9 ± 8.8 |
| EGFR-1679 | N/A | 15.8 ± 15.3* | 15.9 ± 8.5* |
| EGFR-1691 | 1725 | 39.1 ± 6.4 | 21.3 ± 4.8 |
| EGFR-1723 | N/A | 20.4 ± 10.4 | 14 ± 7.9 |
| EGFR-1838 | N/A | 36.3 ± 10.5 | 29.4 ± 6.2 |
| EGFR-1963 | 1997 | 45.1 ± 55.6 | 62.1 ± 20.9 |
| EGFR-1964 | 1998 | 81.8 ± 6.2 | 77 ± 2.3 |
| EGFR-2008 | 2042 | 63.5 ± 5.5 | 63.4 ± 7.4 |
| EGFR-2009 | 2043 | 32.1 ± 7.4* | 34.6 ± 6* |
| EGFR-2010 | 2044 | 52.8 ± 4.3 | 46.5 ± 6.6 |
| EGFR-2011 | 2045 | 25.3 ± 3.7 | 27.9 ± 5.4 |
| EGFR-2012 | 2046 | 47.1 ± 15.3 | 51.8 ± 14.6 |
| EGFR-2227 | N/A | 76.7 ± 11.1 | 85 ± 8.2 |
| EGFR-2228 | N/A | 86 ± 3.9 | 86.5 ± 2.9 |
| EGFR-2232 | N/A | 141.2 ± 5.6 | 127.4 ± 7.4 |
| EGFR-2233 | N/A | 80 ± 11 | 71.3 ± 11.3 |
| EGFR-2295 | N/A | 103.7 ± 4.6 | 89.4 ± 4.3 |
| EGFR-2298 | N/A | 145 ± 17.4 | 131.4 ± 12 |
| EGFR-2399 | N/A | 36.7 ± 5.3 | 30.9 ± 2.5 |
| EGFR-2401 | 2441 | 62.7 ± 4.1 | 45.6 ± 8.3 |
| EGFR-2402 | 2442 | 85.2 ± 6 | 87.4 ± 6.6 |
| EGFR-2417 | N/A | 70 ± 7.8* | 78.3 ± 11.4* |
| EGFR-2419 | N/A | 57.5 ± 6.6 | 61.4 ± 8.1 |
| EGFR-2420 | N/A | 69.6 ± 6.7 | 68.9 ± 6.1 |
| EGFR-2421 | N/A | 160.1 ± 15.8 | 155.7 ± 5.6 |
| EGFR-2422 | N/A | 112.5 ± 6.3 | 82.2 ± 3.8 |
| EGFR-2458 | 2498 | 23.9 ± 16 | 18.6 ± 7 |
| EGFR-2459 | 2499 | 39.6 ± 10.6 | 35.3 ± 6.7 |
| EGFR-2460 | 2500 | 18.3 ± 5.6 | 16.7 ± 4.6 |
| EGFR-2461 | 2501 | 22.4 ± 14.6 | 16.4 ± 11.2 |
| EGFR-2462 | 2502 | 13.2 ± 6.7 | 10.5 ± 4.9 |
| EGFR-2463 | 2503 | 14.6 ± 14 | 11.6 ± 8.1 |
| EGFR-2464 | 2504 | 26.7 ± 3.7 | 12.9 ± 3.1 |
| EGFR-2465 | 2505 | 16.6 ± 31.9 | 14.7 ± 7.3 |
| EGFR-2591 | N/A | 77.9 ± 13.3 | 83.2 ± 10 |
| EGFR-2592 | N/A | 118.6 ± 10.2 | 123.7 ± 10.6 |
| EGFR-2594 | N/A | 102.8 ± 2.1 | 97.5 ± 2.6 |
| EGFR-2624 | N/A | 28.5 ± 12.9 | 25.2 ± 11.1 |
| EGFR-2627 | N/A | 135.2 ± 6.9 | 103.4 ± 10.2 |
| EGFR-2631 | N/A | 73.7 ± 6.2 | 67 ± 2.7 |
| EGFR-2632 | N/A | 123.1 ± 3.1 | 104.1 ± 5.5 |
| EGFR-2643 | N/A | 68.1 ± 2.3 | 66.3 ± 2.7 |
| EGFR-2644 | N/A | 85.2 ± 5.4 | 79.5 ± 4.3 |
| EGFR-2754 | N/A | 68.5 ± 7.1 | 58.4 ± 6.8 |
| EGFR-2756 | N/A | 75.8 ± 20.5 | 69.2 ± 12.4 |
| EGFR-2757 | N/A | 104.3 ± 4.8 | 99.6 ± 3.9 |
| EGFR-2758 | N/A | 116.8 ± 13 | 109.2 ± 1.5 |
| EGFR-2760 | N/A | 61.1 ± 4.6 | 59 ± 5.2 |
| EGFR-2762 | N/A | 59.4 ± 7.7 | 54.3 ± 8.8 |
| EGFR-2764 | N/A | 68.6 ± 9.4 | 74.1 ± 4.6 |
| EGFR-2765 | N/A | 133.7 ± 4.2 | 117.7 ± 3.8 |
| EGFR-2767 | N/A | 70 ± 8.4 | 86.5 ± 5 |
| EGFR-2815 | 2855 | 30.5 ± 13.7 | 19.7 ± 11.5 |
| EGFR-2816 | 2856 | 20.4 ± 5.8 | 14.7 ± 5.8 |
| EGFR-2817 | 2857 | 23.8 ± 9.6 | 18.9 ± 6.8 |
| EGFR-2818 | 2858 | 22.8 ± 2.9 | 16.5 ± 3.8 |
| EGFR-2819 | 2859 | 23.4 ± 13.5 | 19.5 ± 10.7 |
| EGFR-2820 | 2860 | 54.4 ± 5.3 | 46.9 ± 8.2 |
| EGFR-2821 | 2861 | 49.2 ± 5.6 | 35.4 ± 1.7 |
| EGFR-2822 | 2862 | 182.2 ± 1.1 | 130.5 ± 1.7 |
| EGFR-2823 | 2863 | 105 ± 16.3 | 80.5 ± 14.5 |
| EGFR-2824 | 2864 | 67.7 ± 5.8 | 77.3 ± 6 |
| EGFR-2825 | 2865 | 66.8 ± 8.7 | 63.3 ± 10 |
| EGFR-2826 | 2866 | 106 ± 13.1 | 111.6 ± 13 |
| EGFR-2827 | 2867 | 116 ± 7 | 96.8 ± 4.7 |
| EGFR-2828 | 2868 | 100 ± 3.1 | 84.2 ± 6.9 |
| EGFR-2829 | 2869 | 48.7 ± 8.3 | 45.4 ± 8 |
| EGFR-2830 | 2870 | 57.4 ± 9.2 | 72.9 ± 7.8 |
| EGFR-2831 | 2871 | 44.5 ± 13.2 | 51.7 ± 14.1 |
| EGFR-2832 | 2872 | 74.7 ± 7.5 | 72.8 ± 6.7 |
| EGFR-2833 | 2873 | 80 ± 3.5 | 66.3 ± 6.6 |
| EGFR-2834 | 2874 | 109.6 ± 10 | 93.2 ± 8.7 |
| EGFR-2835 | 2875 | 88.4 ± 5.7 | 79.1 ± 4.1 |
| EGFR-2836 | 2876 | 85.9 ± 7.7 | 76.6 ± 2.8 |
| EGFR-2837 | 2877 | 77.5 ± 7.5 | 59.9 ± 4.7 |
| EGFR-2891 | 2931 | 62.7 ± 7.9 | 55.2 ± 7.3 |
| EGFR-2892 | 2932 | 31.2 ± 3 | 25.1 ± 3 |
| EGFR-2893 | 2933 | 33.3 ± 10.3 | 32.6 ± 4.2 |
| EGFR-2894 | 2934 | 38.4 ± 10.2 | 29 ± 8.2 |
| EGFR-2895 | 2935 | 43.6 ± 14.3 | 37.8 ± 5.8 |
| EGFR-2896 | 2936 | 52.8 ± 9.5 | 45 ± 3.1 |
| EGFR-2897 | 2937 | 20.9 ± 13.3 | 19.6 ± 10.2 |
| EGFR-2915 | N/A | 14.7 ± 14.5 | 10 ± 9.5 |
| EGFR-3088 | 3128 | 26.7 ± 4.8 | 18.5 ± 6.8 |
| EGFR-3089 | 3129 | 33.6 ± 22.7 | 27.7 ± 4.3 |
| EGFR-3090 | 3130 | 29.9 ± 18.2 | 19.8 ± 17.2 |
| EGFR-3091 | 3131 | 34.8 ± 22.5 | 26.4 ± 22 |
| EGFR-3092 | 3132 | 18.4 ± 26.6* | 12.2 ± 15.8* |
| EGFR-3093 | 3133 | 73.5 ± 16 | 49.5 ± 17.1 |
| EGFR-3094 | 3134 | 17.8 ± 21.1 | 14.3 ± 21.7 |
| EGFR-3095 | 3135 | 25.4 ± 13.3 | 20.8 ± 16.9 |
| EGFR-3096 | 3136 | 71.7 ± 15.6 | 45.9 ± 17.2 |
| EGFR-3097 | 3137 | 38.1 ± 8.1 | 29.1 ± 8.8 |
| EGFR-3098 | 3138 | 33.6 ± 13.2 | 30.3 ± 5.4 |
| EGFR-3099 | 3139 | 76.8 ± 14.5 | 60 ± 10.5 |
| EGFR-3100 | 3140 | 35 ± 6.5 | 30.9 ± 3.9 |
| EGFR-3101 | 3141 | 44 ± 5.7 | 33 ± 4.4 |
| EGFR-3102 | 3142 | 28.7 ± 11.3 | 24.6 ± 10.4 |
| EGFR-3103 | 3143 | 22.6 ± 12.2 | 19.1 ± 9.8 |
| EGFR-3104 | 3144 | 50.4 ± 7.2 | 36.9 ± 3.3 |
| EGFR-3105 | 3145 | 19 ± 11.7 | 15.3 ± 5.5 |
| EGFR-3106 | 3146 | 29.2 ± 10.1 | 22.6 ± 5 |
| EGFR-3107 | 3147 | 22.9 ± 15.4 | 22 ± 9 |
| EGFR-3108 | 3148 | 15 ± 6.4 | 10.1 ± 4.3 |
| EGFR-3109 | 3149 | 21.7 ± 22.6 | 14.7 ± 12.4 |
| EGFR-3110 | 3150 | 13.1 ± 11.7 | 10.3 ± 7.3 |
| EGFR-3111 | 3151 | 11 ± 3.7 | 12.2 ± 4.3 |
| EGFR-3112 | 3152 | 19.7 ± 3.1 | 11.1 ± 3.1 |
| EGFR-3113 | 3153 | 35.2 ± 12.2 | 34.6 ± 13.4 |
| EGFR-3115 | N/A | 20.7 ± 8.1* | 20.1 ± 6.7* |
| EGFR-3117 | N/A | 21.3 ± 5.7 | 22 ± 6.6 |
| EGFR-3118 | N/A | 18.4 ± 6.7 | 13.4 ± 6.7 |
| EGFR-3120 | N/A | 26.3 ± 9.8 | 23.9 ± 8.9 |
| EGFR-3169 | 3209 | 63 ± 21.1 | 67.2 ± 15.3 |
| EGFR-3170 | 3210 | 92.8 ± 7.6 | 78.2 ± 10.3 |
| EGFR-3220 | 3260 | 27.7 ± 6.9 | 31.9 ± 7.8 |
| EGFR-3221 | 3261 | 30.2 ± 10.5 | 18.8 ± 7.4 |
| EGFR-3222 | 3262 | 15.2 ± 11.2 | 14.2 ± 11.4 |
| EGFR-3223 | 3263 | 17.6 ± 17.1 | 15.2 ± 11.5 |
| EGFR-3224 | 3264 | 23.1 ± 18.4 | 24.2 ± 7.9 |
| EGFR-3372 | N/A | 24.8 ± 18.7 | 20.5 ± 18.6 |
| EGFR-3375 | N/A | 26.2 ± 24.5 | 27.6 ± 9.4 |
| EGFR-3440 | N/A | 63 ± 5.9 | 56.9 ± 6.4 |
| EGFR-3441 | N/A | 76.5 ± 7.7 | 70.1 ± 6.3 |
| EGFR-3457 | N/A | 51.7 ± 15.6 | 36 ± 8.7 |
| EGFR-3458 | N/A | 67.4 ± 6.2 | 52.4 ± 6 |
| EGFR-3459 | N/A | 20.6 ± N/A | 28.2 ± N/A |
| EGFR-3460 | N/A | 81.3 ± 1.7 | 70.6 ± 3.7 |
| EGFR-3461 | N/A | 102 ± 7.1 | 79.9 ± 5.1 |
| EGFR-3463 | N/A | 44.7 ± 11.6 | 34.3 ± 2.8 |
| EGFR-3772 | 3806 | 29.3 ± 16.5 | 26.3 ± 12.8 |
| EGFR-3773 | 3807 | 30.4 ± 18 | 34 ± 5.6 |
| EGFR-3774 | 3808 | 30.9 ± 1.8 | 19.6 ± 2 |
| EGFR-3775 | 3809 | 18.2 ± 11.6 | 19.1 ± 3.9 |
| EGFR-3776 | 3810 | 23.8 ± 3.2 | 15.6 ± 4.9 |
| EGFR-3777 | 3811 | 14.2 ± 5.9 | 13.3 ± 2.5 |
| EGFR-3778 | 3812 | 20.3 ± 8 | 18.8 ± 2.8 |
| EGFR-3779 | 3813 | 27.3 ± 3.5 | 25.8 ± 9.5 |
| EGFR-3876 | N/A | 23.2 ± 10.3 | 22.5 ± 5 |
| EGFR-4178 | N/A | 38.1 ± 6.8 | 22.6 ± 6.9 |
| EGFR-4205 | N/A | 43.3 ± 12.6 | 34.3 ± 7.8 |
| EGFR-4249 | N/A | 26.5 ± 2.9 | 10.4 ± 2.6 |
| EGFR-4284 | N/A | 67.3 ± 5.2 | 53.2 ± 6.2 |
| EGFR-4285 | N/A | 61.9 ± 8.4 | 42.1 ± 9.5 |
| EGFR-4286 | N/A | 85.6 ± 8.8 | 71.8 ± 4.9 |
| EGFR-4287 | N/A | 59.5 ± 1.8 | 41.8 ± 2.8 |
| EGFR-4288 | N/A | 73.8 ± 15.4 | 60.6 ± 11.2 |
| EGFR-4290 | N/A | 79.7 ± 13.4 | 73.9 ± 9.9 |
| EGFR-4291 | N/A | 59.9 ± 9 | 42.6 ± 11.4 |
| EGFR-4292 | N/A | 56.4 ± 5.7 | 30.6 ± 4.3 |
| EGFR-4293 | N/A | 60.1 ± 7.2 | 40.5 ± 7.5 |
| EGFR-4294 | N/A | 58.3 ± 5.4 | 52 ± 4.7 |
| EGFR-4295 | N/A | 46 ± 8.1 | 29.2 ± 3.7 |
| EGFR-4372 | N/A | 44.8 ± 9.6 | 27.1 ± 3.6 |
| EGFR-4373 | N/A | 33.2 ± 11.9 | 33.7 ± 7.3 |
| EGFR-4450 | N/A | 35 ± 7.5 | 14.9 ± 8.9 |
| EGFR-4455 | N/A | 27.3 ± 6.9 | 12.7 ± 4.6 |
| EGFR-4550 | N/A | 18.2 ± 5 | 12 ± 4 |
| EGFR-4684 | N/A | 65.9 ± 7.9 | 36.8 ± 6.3 |
| EGFR-4804 | N/A | 34.8 ± 5.7 | 15.1 ± 2.6 |
| EGFR-4806 | N/A | 24.7 ± 10.4 | 7.8 ± 4.6 |
| EGFR-4807 | N/A | 43.3 ± N/A | 12.4 ± N/A |
| EGFR-4808 | N/A | 63 ± 4.6 | 15.2 ± 6.5 |
| EGFR-4809 | N/A | 40.6 ± 11.5 | 15 ± 11.9 |
| EGFR-4810 | N/A | 38.9 ± 9.2 | 14.6 ± 10.1 |
| EGFR-4811 | N/A | 26.8 ± 7.8 | 10.4 ± 9.9 |
| EGFR-4812 | N/A | 34.7 ± 10.2 | 10.5 ± 10.6 |
| EGFR-4813 | N/A | 38.7 ± 7.1 | 11.3 ± 4.3 |
| EGFR-4816 | N/A | 28.1 ± 7.7 | 11 ± 7.3 |
| EGFR-4817 | N/A | 24.4 ± 10.9 | 11.1 ± 4.8 |
| EGFR-4818 | N/A | 41.6 ± 11.2 | 18 ± 8.2 |
| EGFR-4819 | N/A | 24.3 ± 15.9 | 14.5 ± 14.3 |
| EGFR-4824 | N/A | 39.7 ± 3.1 | 15.9 ± 3.2 |
| EGFR-4953 | N/A | 26.6 ± 7.2 | 14.1 ± 5.7 |
| EGFR-4970 | N/A | 38.8 ± 9.4 | 18.7 ± 8.2 |
| EGFR-5003 | N/A | 30.7 ± 12 | 16.8 ± 7.6 |
| EGFR-5206 | N/A | 24.6 ± 17.9 | 13.6 ± 18.1 |
| EGFR-5275 | N/A | 50.5 ± 2.8 | 40.5 ± 4.3 |
| EGFR-5374 | N/A | 45.3 ± 12.1 | 34.2 ± 5.7 |
| EGFR-5429 | N/A | 54.2 ± 12.5 | 49.8 ± 6.7 |
| EGFR-5497 | N/A | 36.1 ± 2.3 | 25.9 ± 1.4 |
| EGFR-5505 | N/A | 36.1 ± 20.7 | 25.8 ± 19.1 |
| EGFR-5506 | N/A | 29.2 ± 5.4 | 19.4 ± 2.5 |
| EGFR-5512 | N/A | 68.9 ± 9.8 | 52.3 ± 7.3 |
| EGFR-5565 | N/A | 42.6 ± 10.2 | 34 ± 5.9 |

*Only normalized to SFRS9

[0409] The following DsiRNAs were observed to reduce EGFR levels by 70% or more when administered to mammalian cells (here, human HeLa cells) at 1 nM: EGFR-390, EGFR-458, EGFR-464, EGFR-525, EGFR-676, EGFR-707, EGFR-827, EGFR-876, EGFR-877, EGFR-878, EGFR-1271, EGFR-1286, EGFR-1313, EGFR-1330, EGFR-1562, EGFR-1563, EGFR-1679, EGFR-1723, EGFR-2011, EGFR-2458, EGFR-2460, EGFR-2461, EGFR-2462, EGFR-2463, EGFR-2464, EGFR-2465, EGFR-2624, EGFR-2816, EGFR-2817, EGFR-2818, EGFR-2819, EGFR-2897, EGFR-2915, EGFR-3088, EGFR-3090, EGFR-3092, EGFR-3094, EGFR-3095, EGFR-3102, EGFR-3103, EGFR-3105, EGFR-3106, EGFR-3107, EGFR-3108, EGFR-3109, EGFR-3110, EGFR-3111, EGFR-3112, EGFR-3115, EGFR-3117, EGFR-3118, EGFR-3120, EGFR-3222, EGFR-3223, EGFR-3224, EGFR-3372, EGFR-3375, EGFR-3459, EGFR-3772, EGFR-3775, EGFR-3776, EGFR-3777, EGFR-3778, EGFR-3779, EGFR-3876, EGFR-4249, EGFR-4455, EGFR-4550, EGFR-4806, EGFR-4811, EGFR-4816, EGFR-4817, EGFR-4819, EGFR-4953, EGFR-5206 and EGFR-5506.

[0410] Among these DsiRNAs, the following DsiRNAs were observed to reduce EGFR levels by 80% or more when administered at 1 nM: EGFR-390, EGFR-458, EGFR-877, EGFR-1271, EGFR-1313, EGFR-1330, EGFR-1563, EGFR-1679, EGFR-2460, EGFR-2462, EGFR-2463, EGFR-2465, EGFR-2915, EGFR-3092, EGFR-3094, EGFR-3105, EGFR-3108, EGFR-3110, EGFR-3111, EGFR-3112, EGFR-3118, EGFR-3222, EGFR-3223, EGFR-3775, EGFR-3777 and EGFR-4550.

TABLE 12
EGFR Inhibitory Efficacy of DsiRNAs Assayed
at 1 nM in Mouse HEPA1-6 Cells

| DsiRNA | Mouse | | |
|---|---|---|---|
| Name | EGFR | | |
| (Human | Target | % Remaining EGFR | % Remaining |
| EGFR | Location/ | mRNA ± % Error | EGFR mRNA ± % |
| Target | DsiRNA | (Assay: Mm EGFR | Error (Assay: Mm |
| Location) | Name | 1955-2098) | EGFR 3602-3699) |
| EGFR-463 | 497 | 95.8 ± 20 | 103.7 ± 11 |
| EGFR-464 | 498 | 42.6 ± 8.5 | 48.5 ± 5.8 |
| EGFR-496 | 530 | 82.3 ± 2.3 | 82.2 ± 1.9 |
| EGFR-497 | 531 | 97.7 ± 1.6 | 107.9 ± 2.7 |
| EGFR-498 | 532 | 114.7 ± 8.1 | 119.8 ± 6.6 |
| EGFR-499 | 533 | 101.5 ± 3.7 | 113.3 ± 1.9 |
| EGFR-500 | 534 | 127 ± 11.9 | 126.1 ± 6.6 |
| EGFR-501 | 535 | 105.3 ± 4.8 | 135.7 ± 3.4 |
| EGFR-502 | 536 | 108.6 ± 2.7 | 96.1 ± 2.3 |
| EGFR-503 | 537 | 99.5 ± 7.3 | 95.7 ± 4.1 |
| EGFR-504 | 538 | 100.9 ± 2.3 | 104 ± 5.3 |
| EGFR-505 | 539 | 72.6 ± 5.5 | 100.2 ± 8.3 |
| EGFR-506 | 540 | 94.4 ± 17.8 | 116.9 ± 2.2 |
| EGFR-507 | 541 | 100.7 ± 6 | 109.6 ± 3.3 |
| EGFR-508 | 542 | 123.7 ± 4 | 120.4 ± 3.2 |
| EGFR-509 | 543 | 118.1 ± 3.5 | 114.5 ± 1.9 |
| EGFR-838 | 872 | 109.7 ± 11.7 | 97.3 ± 5.4 |
| EGFR-839 | 873 | 79.2 ± 2.3 | 78.7 ± 3.7 |
| EGFR-840 | 874 | 73 ± 9.5 | 73.9 ± 5.4 |
| EGFR-841 | 875 | 80.7 ± 9.3 | 99.5 ± 2.9 |
| EGFR-842 | 876 | 84.6 ± 14.3 | 95.9 ± 4.3 |
| EGFR-876 | 910 | 69.2 ± 10.4 | 79.9 ± 4.7 |
| EGFR-877 | 911 | 84.7 ± 5.8 | 91.3 ± 5.1 |
| EGFR-878 | 912 | 78.2 ± 10.1 | 83.8 ± 5.7 |
| EGFR-879 | 913 | 114.8 ± 2.6 | 111.4 ± 2.4 |
| EGFR-899 | 933 | 137.2 ± 11.5 | 145.3 ± 7.4 |
| EGFR-900 | 934 | 89.9 ± 5.4 | 118.7 ± 2.6 |
| EGFR-2820 | 2860 | 94.8 ± 7.6 | 98.2 ± 6.7 |
| EGFR-2821 | 2861 | 89.9 ± 2.2 | 94.7 ± 2.3 |
| EGFR-2822 | 2862 | 134 ± 17.5 | 110.6 ± 16.7 |
| EGFR-2823 | 2863 | 127.6 ± 6.7 | 113 ± 6.2 |
| EGFR-2824 | 2864 | 112.7 ± 3.4 | 108.4 ± 4 |
| EGFR-2825 | 2865 | 90.1 ± 7.7 | 103.9 ± 7.6 |
| EGFR-2826 | 2866 | 130.8 ± 1.6 | 121.6 ± 1.9 |
| EGFR-2827 | 2867 | 108.2 ± 8.3 | 107.4 ± 7.3 |
| EGFR-2828 | 2868 | 122.4 ± 9 | 118 ± 3.3 |
| EGFR-2829 | 2869 | 112.1 ± 2.3 | 125.1 ± 3.8 |
| EGFR-2830 | 2870 | 101.4 ± 6.3 | 102.8 ± 5 |
| EGFR-2831 | 2871 | 103.5 ± 4.6 | 105.4 ± 1.6 |
| EGFR-2832 | 2872 | 94.4 ± 17.6 | 101.1 ± 11.2 |
| EGFR-2833 | 2873 | 73.9 ± 22.1 | 100.2 ± 11.3 |
| EGFR-2834 | 2874 | 119.5 ± 15 | 108.3 ± 9.1 |
| EGFR-2835 | 2875 | 114.9 ± 7.2 | 118.7 ± 6.3 |
| EGFR-2836 | 2876 | 142.4 ± 6.1 | 137.8 ± 1.6 |
| EGFR-2837 | 2877 | 146.1 ± 4.4 | 140.5 ± 3 |
| EGFR-2891 | 2931 | 72.1 ± 6 | 57.1 ± 4 |
| EGFR-2892 | 2932 | 73.9 ± 3 | 55.1 ± 7.5 |
| EGFR-2893 | 2933 | 64.1 ± 12.1 | 56.5 ± 5.7 |
| EGFR-2894 | 2934 | 65.4 ± 1 | 75.2 ± 3.5 |
| EGFR-2895 | 2935 | 88.4 ± 13.9 | 81 ± 4.1 |
| EGFR-2896 | 2936 | 74.7 ± 14.7 | 86.9 ± 4.6 |
| EGFR-2897 | 2937 | 82.3 ± 7.6 | 69.3 ± 1.6 |
| EGFR-3088 | 3128 | 74.2 ± 2.3 | 55.1 ± 3.3 |
| EGFR-3089 | 3129 | 29.1 ± 31 | 31.9 ± 12.8 |
| EGFR-3090 | 3130 | 64.4 ± 12.5 | 48.6 ± 8.8 |
| EGFR-3091 | 3131 | 77.5 ± 1 | 67.7 ± 1.7 |
| EGFR-3092 | 3132 | 86.7 ± 4.5 | 76.8 ± 7.6 |
| EGFR-3093 | 3133 | 91 ± N/A | 100.8 ± N/A |
| EGFR-3094 | 3134 | 57.2 ± 4.6 | 47.1 ± 5.6 |
| EGFR-3095 | 3135 | 85.4 ± 7.9 | 76.9 ± 8.8 |
| EGFR-3096 | 3136 | 87.3 ± 2.3 | 73.5 ± 2.5 |
| EGFR-3097 | 3137 | 51.5 ± 10.9 | 41.8 ± 1.4 |
| EGFR-3098 | 3138 | 67.1 ± 7.9 | 63.6 ± 2.3 |
| EGFR-3099 | 3139 | 101.2 ± 9.9 | 94.9 ± 6.8 |
| EGFR-3100 | 3140 | 68 ± 13.3 | 64.6 ± 5.3 |
| EGFR-3101 | 3141 | 92.2 ± 5 | 96.9 ± 8.2 |
| EGFR-3102 | 3142 | 77.3 ± 12.1 | 74.1 ± 9.1 |
| EGFR-3103 | 3143 | 69.7 ± 8 | 60.7 ± 9.7 |
| EGFR-3104 | 3144 | 84.8 ± 2.1 | 78.9 ± 3 |
| EGFR-3105 | 3145 | 42.8 ± 5.5 | 26.1 ± 3.1 |
| EGFR-3106 | 3146 | 63 ± 6.9 | 51.5 ± 6.1 |
| EGFR-3107 | 3147 | 60.2 ± 11.1 | 49.4 ± 5.7 |
| EGFR-3108 | 3148 | 48.6 ± 1.8 | 33.9 ± 2.4 |
| EGFR-3109 | 3149 | 46.6 ± 3 | 37.1 ± 7.6 |
| EGFR-3110 | 3150 | 38 ± 9.7 | 26.3 ± 3.4 |
| EGFR-3111 | 3151 | 46.5 ± 4 | 30.9 ± 11.5 |
| EGFR-3112 | 3152 | 45.3 ± 7 | 28.8 ± 5.4 |
| EGFR-3113 | 3153 | 100.5 ± 16.4 | 80.1 ± 5.4 |
| EGFR-3169 | 3209 | 122.6 ± 3.5 | 104.1 ± 2.7 |
| EGFR-3170 | 3210 | 116.6 ± 11.4 | 119.3 ± 10.3 |
| EGFR-3220 | 3260 | 86.2 ± 13.1 | 81.4 ± 8 |
| EGFR-3221 | 3261 | 69.6 ± 1.5 | 53.5 ± 4.5 |
| EGFR-3222 | 3262 | 54.9 ± 3.6 | 40.3 ± 6.2 |
| EGFR-3223 | 3263 | 75.5 ± 4.6 | 56.2 ± 7.4 |
| EGFR-3224 | 3264 | 81.6 ± 3.8 | 68.9 ± 3.7 |
| EGFR-3772 | 3806 | 87.1 ± 6.8 | 53.9 ± 9.7 |
| EGFR-3773 | 3807 | 93.9 ± 3.9 | 67.1 ± 2.9 |
| EGFR-3774 | 3808 | 72.3 ± 8.7 | 49.7 ± 9.6 |
| EGFR-3775 | 3809 | 75.6 ± 21.4 | 48.8 ± 29.3 |
| EGFR-3776 | 3810 | 70.8 ± 4 | 48.5 ± 1.7 |
| EGFR-3777 | 3811 | 66 ± 9.5 | 43 ± 9.2 |
| EGFR-3778 | 3812 | 71 ± 3.6 | 52.6 ± 5.2 |
| EGFR-3779 | 3813 | 99.7 ± 2.4 | 72.4 ± 3.2 |
| | EGFR-m71 | 89.7 ± 9.9 | 74.8 ± 6.9 |
| | EGFR-m78 | 42.5 ± 13.8 | 55.3 ± 5.8 |
| | EGFR-m87 | 84.5 ± 2.9 | 114 ± 2.8 |
| | EGFR-m90 | 81.3 ± 6.3 | 72.1 ± 5 |
| | EGFR-m92 | 81.7 ± 3.6 | 85.4 ± 4.3 |
| | EGFR-m94 | 74.8 ± 3.4 | 79.3 ± 2.9 |
| | EGFR-m97 | 96 ± 7.7 | 131.7 ± 6.2 |
| | EGFR-m99 | 98.6 ± 6 | 120.5 ± 1.9 |
| | EGFR-m100 | 85.4 ± 3.5 | 71.9 ± 3.6 |
| | EGFR-m101 | 97.5 ± 3.3 | 115.2 ± 3.1 |
| | EGFR-m111 | 100.3 ± 4 | 116.2 ± 4.4 |
| | EGFR-m114 | 99 ± 10.5 | 105 ± 4.3 |
| | EGFR-m333 | 85 ± 5.9 | 132.4 ± 2 |
| | EGFR-m334 | 86.6 ± 5.9 | 109.1 ± 3.9 |
| | EGFR-m335 | 74.6 ± 3.7 | 82.8 ± 3.7 |
| | EGFR-m336 | 78.1 ± 3.3 | 91.4 ± 3.4 |
| | EGFR-m337 | 61.1 ± 4.7 | 87.9 ± 5.1 |
| | EGFR-m338 | 35.8 ± N/A | 37.7 ± N/A |
| | EGFR-m339 | 74 ± 4.9 | 78 ± 5.8 |
| | EGFR-m341 | 69.5 ± 3.4 | 90.8 ± 2.6 |
| | EGFR-m342 | 104.2 ± 10.1 | 135 ± 4.6 |
| | EGFR-m343 | 112.7 ± 11.1 | 105.6 ± 2.2 |
| | EGFR-m344 | 107.5 ± 1.8 | 89.9 ± 2.6 |
| | EGFR-m347 | 107.9 ± 6.8 | 127.7 ± 7.2 |
| | EGFR-m348 | 98.5 ± 8.3 | 86.1 ± 3.9 |
| | EGFR-m734 | 51.9 ± 7.9 | 38.3 ± 5.6 |
| | EGFR-m735 | 52.5 ± 2.4 | 57.7 ± 3.8 |
| | EGFR-m736 | 40.8 ± 4.8 | 39.6 ± 2.3 |
| | EGFR-m738 | 81 ± 2.9 | 90.3 ± 5.3 |
| | EGFR-m740 | 86.7 ± 6.2 | 99.4 ± 4.7 |
| | EGFR-m741 | 91.3 ± 2.4 | 78 ± 3 |
| | EGFR-m879 | 48.1 ± 16.2 | 52.2 ± 8 |
| | EGFR-m948 | 76.3 ± N/A | 81 ± N/A |
| | EGFR-m1154 | 71.7 ± 4.3 | 98 ± 8.7 |
| | EGFR-m1302 | 24.4 ± 10.6 | 51.9 ± 13.7 |
| | EGFR-m1439 | 79.9 ± 6.5 | 89.4 ± 2.7 |
| | EGFR-m1509 | 70.7 ± 1.5 | 83.9 ± 4.8 |
| | EGFR-m1526 | 72.5 ± 2.3 | 79 ± 5 |
| | EGFR-m1528 | 43 ± 2.6 | 43.8 ± 5.4 |
| | EGFR-m1531 | 77 ± 2.2 | 66.9 ± 1.4 |
| | EGFR-m2168 | 76.9 ± 23.1 | 80.1 ± 7.9 |
| | EGFR-m2253 | 102.1 ± 3.1 | 83.9 ± 0.9 |
| | EGFR-m2286 | 99.8 ± 9.9 | 107.5 ± 7.3 |
| | EGFR-m2301 | 66.5 ± 8.3 | 88.7 ± 21.3 |
| | EGFR-m2350 | 52.4 ± 3.1 | 48.6 ± 5 |
| | EGFR-m2351 | 86.6 ± 8.3 | 61.2 ± 15.3 |
| | EGFR-m2352 | 83.5 ± 1.5 | 75.1 ± 2.2 |
| | EGFR-m2617 | 115 ± 9.5 | 99.9 ± 9.2 |
| | EGFR-m2631 | 115.6 ± 8.6 | 129.2 ± 10.9 |
| | EGFR-m2683 | 64.9 ± 13.8 | 66.3 ± 8.2 |
| | EGFR-m2684 | 107.1 ± 7.9 | 135.8 ± 16.3 |
| | EGFR-m2800 | 81.6 ± 19.2 | 76.7 ± 12.1 |
| | EGFR-m2805 | 89.3 ± 6.3 | 91.3 ± 1.4 |
| | EGFR-m2879 | 83.1 ± 3.1 | 81.7 ± 3 |
| | EGFR-m2880 | 100.8 ± 1.3 | 80.7 ± 2.3 |
| | EGFR-m2882 | 105.3 ± 6.2 | 125.6 ± 6.6 |
| | EGFR-m2883 | 91.3 ± 6.9 | 104.2 ± 3.6 |
| | EGFR-m3154 | 52 ± 14.3 | 50.7 ± 9 |
| | EGFR-m3155 | 59 ± 7.6 | 52 ± 8 |
| | EGFR-m3156 | 77.8 ± 5.7 | 94.9 ± 3.7 |
| | EGFR-m3157 | 61.3 ± 5.1 | 49.2 ± 3.3 |
| | EGFR-m3158 | 55.5 ± 8 | 52.5 ± 5.6 |
| | EGFR-m3159 | 50.1 ± 3.7 | 41.3 ± 5.8 |
| | EGFR-m3160 | 78.1 ± 2.7 | 84.4 ± 3 |
| | EGFR-m3161 | 83.5 ± 7.3 | 94.6 ± 7.4 |
| | EGFR-m3162 | 82.8 ± 9.4 | 86.3 ± 5 |
| | EGFR-m3163 | 87.8 ± 1.4 | 101.5 ± 3.2 |
| | EGFR-m3166 | 83.3 ± 6 | 91.1 ± 1.9 |
| | EGFR-m3168 | 60.8 ± 4.2 | 62.5 ± 3 |
| | EGFR-m3474 | 33.5 ± 8.2 | 28.9 ± 7.6 |
| | EGFR-m3475 | 83.2 ± 6.8 | 91.2 ± 4.1 |
| | EGFR-m3491 | 55.6 ± 5.9 | 44.2 ± 6.1 |
| | EGFR-m3492 | 90.3 ± 2 | 54.9 ± 1.4 |
| | EGFR-m3493 | 73.8 ± 5.8 | 84.1 ± 6.2 |
| | EGFR-m3494 | 88.5 ± 4.3 | 73.2 ± 3.4 |
| | EGFR-m3495 | 76.1 ± 6.5 | 109.7 ± 1.6 |
| | EGFR-m3496 | 93.1 ± 7.5 | 108.2 ± 6.9 |
| | EGFR-m3497 | 96.9 ± 7.1 | 98.1 ± 6.3 |
| | EGFR-m4056 | 66.5 ± 10.1 | 44.8 ± 7.9 |
| | EGFR-m4103 | 63.7 ± 5.8 | 47.7 ± 5.8 |
| | EGFR-m4104 | 59 ± 5 | 60.7 ± 2.5 |
| | EGFR-m4105 | 71.4 ± 2 | 54.3 ± 5 |
| | EGFR-m4106 | 41.9 ± 12.5 | 34.1 ± 22.9 |
| | EGFR-m4109 | 49.8 ± N/A | 112 ± 25 |
| | EGFR-m4309 | 72.2 ± 7.4 | 64.7 ± 9.4 |
| | EGFR-m4619 | 45.4 ± 6.6 | 27.8 ± 4.2 |
| | EGFR-m4627 | 63.2 ± 9.6 | 42 ± 11.3 |
| | EGFR-m5006 | 88.5 ± 4 | 82 ± 5.4 |
| | EGFR-m5007 | 81.8 ± 3.8 | 69.7 ± 4 |
| | EGFR-m5008 | 180.4 ± 9.2 | 167.4 ± 13.4 |
| | EGFR-m5012 | 56.4 ± 14.5 | 57.3 ± 3.3 |
| | EGFR-m5329 | 56 ± 5.3 | 68.9 ± 18.6 |
| | EGFR-m5330 | 62.3 ± 2.9 | 59 ± 2.2 |
| | EGFR-m5403 | 49.3 ± 4.8 | 35 ± 3.6 |
| | EGFR-m5638 | 81.8 ± 5.6 | 87.9 ± 4.7 |
| | EGFR-m5895 | 49.8 ± 7 | 38.9 ± 0.7 |

[0411] The following DsiRNAs were observed to reduce EGFR levels by 65% or more when administered to mouse cells (here, Hepa1-6 cells) at 1 nM: EGFR-2462, EGFR-3089 and EGFR-m3474.

[0412] Assay results of Tables 11 and 12 above were also plotted and are shown in FIGS. 2A-2D.

[0413] In certain embodiments, double stranded nucleic acids were selected that target the following 21 nucleotide target sequences:

TABLE 13
EGFR 21 Nucleotide Target Sequences of Select
dsRNAs

| Human | | |
|---|---|---|
| EGFR | | |
| Target | | |
| Location | 21 Nucleotide Target Sequence | SEQ ID NO: |
| EGFR-390 | CAGTTGGGCACTTTTGAAGAT | 1431 |
| EGFR-458 | TGGGAATTTGGAAATTACCTA | 1432 |
| EGFR-464 | TTTGGAAATTACCTATGTGCA | 1550 |
| EGFR-525 | GTGGCTGGTTATGTCCTCATT | 1434 |
| EGFR-676 | TGCCCATGAGAAATTTACAGG | 1435 |
| EGFR-707 | TGGCGCCGTGCGGTTCAGCAA | 1437 |
| EGFR-827 | CAGCTGCCAAAAGTGTGATCC | 1441 |
| EGFR-876 | GCAGGAGAGGAGAACTGCCAG | 1570 |
| EGFR-877 | CAGGAGAGGAGAACTGCCAGA | 1571 |
| EGFR-878 | AGGAGAGGAGAACTGCCAGAA | 1572 |
| EGFR-1271 | CCGCAAAGTGTGTAACGGAAT | 1448 |
| EGFR-1286 | CGGAATAGGTATTGGTGAATT | 1449 |
| EGFR-1313 | CTCACTCTCCATAAATGCTAC | 1584 |
| EGFR-1330 | CTACGAATATTAAACACTTCA | 1450 |
| EGFR-1562 | CAAGCAACATGGTCAGTTTTC | 1594 |
| EGFR-1563 | AAGCAACATGGTCAGTTTTCT | 1595 |
| EGFR-1679 | GTGCTATGCAAATACAATAAA | 1454 |
| EGFR-1723 | CCGGTCAGAAAACCAAAATTA | 1455 |
| EGFR-2011 | TCCAGTGTGCCCACTACATTG | 1602 |
| EGFR-2458 | GACTCTGGATCCCAGAAGGTG | 1606 |
| EGFR-2460 | CTCTGGATCCCAGAAGGTGAG | 1608 |
| EGFR-2461 | TCTGGATCCCAGAAGGTGAGA | 1609 |
| EGFR-2462 | CTGGATCCCAGAAGGTGAGAA | 1610 |
| EGFR-2463 | TGGATCCCAGAAGGTGAGAAA | 1611 |
| EGFR-2464 | GGATCCCAGAAGGTGAGAAAG | 1612 |
| EGFR-2465 | GATCCCAGAAGGTGAGAAAGT | 1613 |
| EGFR-2624 | CACCGTGCAGCTCATCACGCA | 1472 |
| EGFR-2816 | GCAGCATGTCAAGATCACAGA | 1615 |
| EGFR-2817 | CAGCATGTCAAGATCACAGAT | 1616 |
| EGFR-2818 | AGCATGTCAAGATCACAGATT | 1617 |
| EGFR-2819 | GCATGTCAAGATCACAGATTT | 1618 |
| EGFR-2897 | AGTGCCTATCAAGTGGATGGC | 1643 |
| EGFR-2915 | GGCATTGGAATCAATTTTACA | 1487 |
| EGFR-3088 | GTACCATCGATGTCTACATGA | 1644 |
| EGFR-3090 | ACCATCGATGTCTACATGATC | 1646 |
| EGFR-3092 | CATCGATGTCTACATGATCAT | 1648 |
| EGFR-3094 | TCGATGTCTACATGATCATGG | 1650 |
| EGFR-3095 | CGATGTCTACATGATCATGGT | 1651 |
| EGFR-3102 | TACATGATCATGGTCAAGTGC | 1658 |
| EGFR-3103 | ACATGATCATGGTCAAGTGCT | 1659 |
| EGFR-3105 | ATGATCATGGTCAAGTGCTGG | 1661 |
| EGFR-3106 | TGATCATGGTCAAGTGCTGGA | 1662 |
| EGFR-3107 | GATCATGGTCAAGTGCTGGAT | 1663 |
| EGFR-3108 | ATCATGGTCAAGTGCTGGATG | 1664 |
| EGFR-3109 | TCATGGTCAAGTGCTGGATGA | 1665 |
| EGFR-3110 | CATGGTCAAGTGCTGGATGAT | 1666 |
| EGFR-3111 | ATGGTCAAGTGCTGGATGATA | 1667 |
| EGFR-3112 | TGGTCAAGTGCTGGATGATAG | 1668 |
| EGFR-3115 | TCAAGTGCTGGATGATAGACG | 1488 |
| EGFR-3117 | AAGTGCTGGATGATAGACGCA | 1489 |
| EGFR-3118 | AGTGCTGGATGATAGACGCAG | 1490 |
| EGFR-3120 | TGCTGGATGATAGACGCAGAT | 1491 |
| EGFR-3222 | GATGAAAGAATGCATTTGCCA | 1674 |
| EGFR-3223 | ATGAAAGAATGCATTTGCCAA | 1675 |
| EGFR-3224 | TGAAAGAATGCATTTGCCAAG | 1676 |
| EGFR-3372 | CTCCTGAGCTCTCTGAGTGCA | 1492 |
| EGFR-3375 | CTGAGCTCTCTGAGTGCAACC | 1493 |
| EGFR-3459 | GACAGCTTCTTGCAGCGATAC | 1498 |
| EGFR-3772 | TGGACAACCCTGACTACCAGC | 1677 |
| EGFR-3775 | ACAACCCTGACTACCAGCAGG | 1680 |
| EGFR-3776 | CAACCCTGACTACCAGCAGGA | 1681 |
| EGFR-3777 | AACCCTGACTACCAGCAGGAC | 1682 |
| EGFR-3778 | ACCCTGACTACCAGCAGGACT | 1683 |
| EGFR-3779 | CCCTGACTACCAGCAGGACTT | 1684 |
| EGFR-3876 | CCACAAAGCAGTGAATTTATT | 1502 |
| EGFR-4249 | CGCTATTGATTTTTACTTCAA | 1505 |
| EGFR-4455 | GCCGGATCGGTACTGTATCAA | 1520 |
| EGFR-4550 | TCCTTAGACTTACTTTTGTAA | 1521 |
| EGFR-4806 | TAAGGATAGCACCGCTTTTGT | 1524 |
| EGFR-4811 | ATAGCACCGCTTTTGTTCTCG | 1529 |
| EGFR-4816 | ACCGCTTTTGTTCTCGCAAAA | 1532 |
| EGFR-4817 | CCGCTTTTGTTCTCGCAAAAA | 1533 |
| EGFR-4819 | GCTTTTGTTCTCGCAAAAACG | 1535 |
| EGFR-4953 | CAAAATTAGTTTGTGTTACTT | 1537 |
| EGFR-5206 | AAACTAGGGTTTGAAATTGAT | 1540 |
| EGFR-5506 | TGTTCCTTTTGCTTTTAAAGT | 1546 |

[0414] In further preferred embodiments, double stranded nucleic acids were selected that target the following 21 nucleotide target sequences:

TABLE 14
EGFR 21 Nucleotide Target Sequences of Further
Selected dsRNAs

| Human | | |
|---|---|---|
| EGFR | | |
| Target | | |
| Location | 21 Nucleotide Target Sequence | SEQ ID NO: |
| EGFR-390 | CAGTTGGGCACTTTTGAAGAT | 1431 |
| EGFR-458 | TGGGAATTTGGAAATTACCTA | 1432 |
| EGFR-877 | CAGGAGAGGAGAACTGCCAGA | 1571 |
| EGFR-1271 | CCGCAAAGTGTGTAACGGAAT | 1448 |
| EGFR-1313 | CTCACTCTCCATAAATGCTAC | 1584 |
| EGFR-1330 | CTACGAATATTAAACACTTCA | 1450 |
| EGFR-1563 | AAGCAACATGGTCAGTTTTCT | 1595 |
| EGFR-1679 | GTGCTATGCAAATACAATAAA | 1454 |
| EGFR-2460 | CTCTGGATCCCAGAAGGTGAG | 1608 |
| EGFR-2462 | CTGGATCCCAGAAGGTGAGAA | 1610 |
| EGFR-2463 | TGGATCCCAGAAGGTGAGAAA | 1611 |
| EGFR-2465 | GATCCCAGAAGGTGAGAAAGT | 1613 |
| EGFR-2915 | GGCATTGGAATCAATTTTACA | 1487 |
| EGFR-3092 | CATCGATGTCTACATGATCAT | 1648 |
| EGFR-3094 | TCGATGTCTACATGATCATGG | 1650 |
| EGFR-3105 | ATGATCATGGTCAAGTGCTGG | 1661 |
| EGFR-3108 | ATCATGGTCAAGTGCTGGATG | 1664 |
| EGFR-3110 | CATGGTCAAGTGCTGGATGAT | 1666 |
| EGFR-3111 | ATGGTCAAGTGCTGGATGATA | 1667 |
| EGFR-3112 | TGGTCAAGTGCTGGATGATAG | 1668 |
| EGFR-3118 | AGTGCTGGATGATAGACGCAG | 1490 |
| EGFR-3222 | GATGAAAGAATGCATTTGCCA | 1674 |
| EGFR-3223 | ATGAAAGAATGCATTTGCCAA | 1675 |
| EGFR-3775 | ACAACCCTGACTACCAGCAGG | 1680 |
| EGFR-3777 | AACCCTGACTACCAGCAGGAC | 1682 |
| EGFR-4550 | TCCTTAGACTTACTTTTGTAA | 1521 |

### Example 3

### DsiRNA Inhibition of EGFR—Secondary Screen

[0415] 72 asymmetric DsiRNAs of the above experiment were then examined in a secondary assay (“Phase 2”), with results of such assays presented in histogram form in FIGS. 3A-3D. Specifically, the 72 asymmetric DsiRNAs selected from the 356 tested above were assessed for inhibition of human EGFR at 1 nM, 0.3 nM and 0.1 nM in the environment of human HeLa cells (FIGS. 3A-3B). These 72 asymmetric DsiRNAs were also assessed for inhibition of mouse EGFR at 1 nM, 0.3 nM and 0.1 nM in the environment of mouse HEPA1-6 cells (FIGS. 3C-3D). As shown in FIGS. 3A-3B, a number of asymmetric DsiRNAs reproducibly exhibited robust human EGFR inhibitory efficacies at sub-nanomolar concentrations when assayed in the environment of HeLa cells. For example, the following DsiRNAs reproducibly exhibited greater than 70% reduction of EGFR levels when administered to mammalian cells (here, HeLa cells) at a concentration of 100 pM or less in the environment of these cells: EGFR-390, EGFR-458, EGFR-4249, EGFR-4813 and EGFR-4953. In addition, as shown in FIGS. 3C-3D, a number of asymmetric DsiRNAs also showed significant mouse EGFR inhibitory efficacies at 1 nM, 300 pM and 100 pM when assayed in the environment of mouse HEPA1-6 cells. (Meanwhile, human EGFR-specific inhibitory asymmetric DsiRNAs were also identified.)

[0416] In certain preferred embodiments, DsiRNAs are selected from the following: EGFR-2915, EGFR-4249, EGFR-4550, EGFR-4811, EGFR-4812, EGFR-4813, EGFR-4817, EGFR-4970 and EGFR-5206. In such embodiments, the following 21 nucleotide sequences are targeted:

TABLE 15
EGFR 21 Nucleotide Target Sequences of Additional
Selected dsRNAs

| Human | | |
|---|---|---|
| EGFR | | |
| Target | | |
| Location | 21 Nucleotide Target Sequence | SEQ ID NO: |
| EGFR-2915 | GGCATTGGAATCAATTTTACA | 1487 |
| EGFR-4249 | CGCTATTGATTTTTACTTCAA | 1505 |
| EGFR-4550 | TCCTTAGACTTACTTTTGTAA | 1521 |
| EGFR-4811 | ATAGCACCGCTTTTGTTCTCG | 1529 |
| EGFR-4812 | TAGCACCGCTTTTGTTCTCGC | 1530 |
| EGFR-4813 | AGCACCGCTTTTGTTCTCGCA | 1531 |
| EGFR-4817 | CCGCTTTTGTTCTCGCAAAAA | 1533 |
| EGFR-4970 | ACTTATGGAAGATAGTTTTCT | 1538 |
| EGFR-5206 | AAACTAGGGTTTGAAATTGAT | 1540 |

[0417] In further embodiments, other selections of duplexes and corresponding EGFR mRNA targets are made, with such further selections of target sequences shown in Tables 16-26.

TABLE 16
Further EGFR mRNA Target Sequences of dsRNAs

| Human EGFR | | |
|---|---|---|
| Duplex | Target mRNA Sequence | SEQ ID NO: |
| EGFR-390 | CAGUUGGGCACUUUUGAAGAUCAUUUU | 2143 |
| EGFR-390 | CAGUUGGGCACUUUUGAAGAU | 2515 |
| EGFR-390 | CAGUUGGGCACUUUUGAAG | 3295 |
| EGFR-390 | AGUUGGGCACUUUUGAAGA | 3035 |
| EGFR-390 | GUUGGGCACUUUUGAAGAU | 2775 |
| EGFR-458 | UGGGAAUUUGGAAAUUACCUAUGUGCA | 2144 |
| EGFR-458 | UGGGAAUUUGGAAAUUACCUA | 2516 |
| EGFR-458 | UGGGAAUUUGGAAAUUACC | 3296 |
| EGFR-458 | GGGAAUUUGGAAAUUACCU | 3036 |
| EGFR-458 | GGAAUUUGGAAAUUACCUA | 2776 |
| EGFR-878 | AGGAGAGGAGAACUGCCAGAAACUGAC | 2284 |
| EGFR-878 | AGGAGAGGAGAACUGCCAGAA | 2656 |
| EGFR-878 | AGGAGAGGAGAACUGCCAG | 3436 |
| EGFR-878 | GGAGAGGAGAACUGCCAGA | 3176 |
| EGFR-878 | GAGAGGAGAACUGCCAGAA | 2916 |
| EGFR-1271 | CCGCAAAGUGUGUAACGGAAUAGGUAU | 2160 |
| EGFR-1271 | CCGCAAAGUGUGUAACGGAAU | 2532 |
| EGFR-1271 | CCGCAAAGUGUGUAACGGA | 3312 |
| EGFR-1271 | CGCAAAGUGUGUAACGGAA | 3052 |
| EGFR-1271 | GCAAAGUGUGUAACGGAAU | 2792 |
| EGFR-1286 | CGGAAUAGGUAUUGGUGAAUUUAAAGA | 2161 |
| EGFR-1286 | CGGAAUAGGUAUUGGUGAAUU | 2533 |
| EGFR-1286 | CGGAAUAGGUAUUGGUGAA | 3313 |
| EGFR-1286 | GGAAUAGGUAUUGGUGAAU | 3053 |
| EGFR-1286 | GAAUAGGUAUUGGUGAAUU | 2793 |
| EGFR-1313 | CUCACUCUCCAUAAAUGCUACGAAUAU | 2296 |
| EGFR-1313 | CUCACUCUCCAUAAAUGCUAC | 2668 |
| EGFR-1313 | CUCACUCUCCAUAAAUGCU | 3448 |
| EGFR-1313 | UCACUCUCCAUAAAUGCUA | 3188 |
| EGFR-1313 | CACUCUCCAUAAAUGCUAC | 2928 |
| EGFR-1330 | CUACGAAUAUUAAACACUUCAAAAACU | 2162 |
| EGFR-1330 | CUACGAAUAUUAAACACUUCA | 2534 |
| EGFR-1330 | CUACGAAUAUUAAACACUU | 3314 |
| EGFR-1330 | UACGAAUAUUAAACACUUC | 3054 |
| EGFR-1330 | ACGAAUAUUAAACACUUCA | 2794 |
| EGFR-1563 | AAGCAACAUGGUCAGUUUUCUCUUGCA | 2307 |
| EGFR-1563 | AAGCAACAUGGUCAGUUUUCU | 2679 |
| EGFR-1563 | AAGCAACAUGGUCAGUUUU | 3459 |
| EGFR-1563 | AGCAACAUGGUCAGUUUUC | 3199 |
| EGFR-1563 | GCAACAUGGUCAGUUUUCU | 2939 |
| EGFR-1679 | GUGCUAUGCAAAUACAAUAAACUGGAA | 2166 |
| EGFR-1679 | GUGCUAUGCAAAUACAAUAAA | 2538 |
| EGFR-1679 | GUGCUAUGCAAAUACAAUA | 3318 |
| EGFR-1679 | UGCUAUGCAAAUACAAUAA | 3058 |
| EGFR-1679 | GCUAUGCAAAUACAAUAAA | 2798 |
| EGFR-2458 | GACUCUGGAUCCCAGAAGGUGAGAAAG | 2318 |
| EGFR-2458 | GACUCUGGAUCCCAGAAGGUG | 2690 |
| EGFR-2458 | GACUCUGGAUCCCAGAAGG | 3470 |
| EGFR-2458 | ACUCUGGAUCCCAGAAGGU | 3210 |
| EGFR-2458 | CUCUGGAUCCCAGAAGGUG | 2950 |
| EGFR-2462 | CUGGAUCCCAGAAGGUGAGAAAGUUAA | 2322 |
| EGFR-2462 | CUGGAUCCCAGAAGGUGAGAA | 2694 |
| EGFR-2462 | CUGGAUCCCAGAAGGUGAG | 3474 |
| EGFR-2462 | UGGAUCCCAGAAGGUGAGA | 3214 |
| EGFR-2462 | GGAUCCCAGAAGGUGAGAA | 2954 |
| EGFR-2464 | GGAUCCCAGAAGGUGAGAAAGUUAAAA | 2324 |
| EGFR-2464 | GGAUCCCAGAAGGUGAGAAAG | 2696 |
| EGFR-2464 | GGAUCCCAGAAGGUGAGAA | 3476 |
| EGFR-2464 | GAUCCCAGAAGGUGAGAAA | 3216 |
| EGFR-2464 | AUCCCAGAAGGUGAGAAAG | 2956 |
| EGFR-2915 | GGCAUUGGAAUCAAUUUUACACAGAAU | 2199 |
| EGFR-2915 | GGCAUUGGAAUCAAUUUUACA | 2571 |
| EGFR-2915 | GGCAUUGGAAUCAAUUUUA | 3351 |
| EGFR-2915 | GCAUUGGAAUCAAUUUUAC | 3091 |
| EGFR-2915 | CAUUGGAAUCAAUUUUACA | 2831 |
| EGFR-3111 | AUGGUCAAGUGCUGGAUGAUAGACGCA | 2379 |
| EGFR-3111 | AUGGUCAAGUGCUGGAUGAUA | 2751 |
| EGFR-3111 | AUGGUCAAGUGCUGGAUGA | 3531 |
| EGFR-3111 | UGGUCAAGUGCUGGAUGAU | 3271 |
| EGFR-3111 | GGUCAAGUGCUGGAUGAUA | 3011 |
| EGFR-3112 | UGGUCAAGUGCUGGAUGAUAGACGCAG | 2380 |
| EGFR-3112 | UGGUCAAGUGCUGGAUGAUAG | 2752 |
| EGFR-3112 | UGGUCAAGUGCUGGAUGAU | 3532 |
| EGFR-3112 | GGUCAAGUGCUGGAUGAUA | 3272 |
| EGFR-3112 | GUCAAGUGCUGGAUGAUAG | 3012 |
| EGFR-3223 | AUGAAAGAAUGCAUUUGCCAAGUCCUA | 2387 |
| EGFR-3223 | AUGAAAGAAUGCAUUUGCCAA | 2759 |
| EGFR-3223 | AUGAAAGAAUGCAUUUGCC | 3539 |
| EGFR-3223 | UGAAAGAAUGCAUUUGCCA | 3279 |
| EGFR-3223 | GAAAGAAUGCAUUUGCCAA | 3019 |
| EGFR-4249 | CGCUAUUGAUUUUUACUUCAAUGGGCU | 2217 |
| EGFR-4249 | CGCUAUUGAUUUUUACUUCAA | 2589 |
| EGFR-4249 | CGCUAUUGAUUUUUACUUC | 3369 |
| EGFR-4249 | GCUAUUGAUUUUUACUUCA | 3109 |
| EGFR-4249 | CUAUUGAUUUUUACUUCAA | 2849 |
| EGFR-4450 | AGCAGGCCGGAUCGGUACUGUAUCAAG | 2231 |
| EGFR-4450 | AGCAGGCCGGAUCGGUACUGU | 2603 |
| EGFR-4450 | AGCAGGCCGGAUCGGUACU | 3383 |
| EGFR-4450 | GCAGGCCGGAUCGGUACUG | 3123 |
| EGFR-4450 | CAGGCCGGAUCGGUACUGU | 2863 |
| EGFR-4455 | GCCGGAUCGGUACUGUAUCAAGUCAUG | 2232 |
| EGFR-4455 | GCCGGAUCGGUACUGUAUCAA | 2604 |
| EGFR-4455 | GCCGGAUCGGUACUGUAUC | 3384 |
| EGFR-4455 | CCGGAUCGGUACUGUAUCA | 3124 |
| EGFR-4455 | CGGAUCGGUACUGUAUCAA | 2864 |
| EGFR-4550 | UCCUUAGACUUACUUUUGUAAAAAUGU | 2233 |
| EGFR-4550 | UCCUUAGACUUACUUUUGUAA | 2605 |
| EGFR-4550 | UCCUUAGACUUACUUUUGU | 3385 |
| EGFR-4550 | CCUUAGACUUACUUUUGUA | 3125 |
| EGFR-4550 | CUUAGACUUACUUUUGUAA | 2865 |
| EGFR-4806 | UAAGGAUAGCACCGCUUUUGUUCUCGC | 2236 |
| EGFR-4806 | UAAGGAUAGCACCGCUUUUGU | 2608 |
| EGFR-4806 | UAAGGAUAGCACCGCUUUU | 3388 |
| EGFR-4806 | AAGGAUAGCACCGCUUUUG | 3128 |
| EGFR-4806 | AGGAUAGCACCGCUUUUGU | 2868 |
| EGFR-4809 | GGAUAGCACCGCUUUUGUUCUCGCAAA | 2239 |
| EGFR-4809 | GGAUAGCACCGCUUUUGUUCU | 2611 |
| EGFR-4809 | GGAUAGCACCGCUUUUGUU | 3391 |
| EGFR-4809 | GAUAGCACCGCUUUUGUUC | 3131 |
| EGFR-4809 | AUAGCACCGCUUUUGUUCU | 2871 |
| EGFR-4811 | AUAGCACCGCUUUUGUUCUCGCAAAAA | 2241 |
| EGFR-4811 | AUAGCACCGCUUUUGUUCUCG | 2613 |
| EGFR-4811 | AUAGCACCGCUUUUGUUCU | 3393 |
| EGFR-4811 | UAGCACCGCUUUUGUUCUC | 3133 |
| EGFR-4811 | AGCACCGCUUUUGUUCUCG | 2873 |
| EGFR-4812 | UAGCACCGCUUUUGUUCUCGCAAAAAC | 2242 |
| EGFR-4812 | UAGCACCGCUUUUGUUCUCGC | 2614 |
| EGFR-4812 | UAGCACCGCUUUUGUUCUC | 3394 |
| EGFR-4812 | AGCACCGCUUUUGUUCUCG | 3134 |
| EGFR-4812 | GCACCGCUUUUGUUCUCGC | 2874 |
| EGFR-4813 | AGCACCGCUUUUGUUCUCGCAAAAACG | 2243 |
| EGFR-4813 | AGCACCGCUUUUGUUCUCGCA | 2615 |
| EGFR-4813 | AGCACCGCUUUUGUUCUCG | 3395 |
| EGFR-4813 | GCACCGCUUUUGUUCUCGC | 3135 |
| EGFR-4813 | CACCGCUUUUGUUCUCGCA | 2875 |
| EGFR-4817 | CCGCUUUUGUUCUCGCAAAAACGUAUC | 2245 |
| EGFR-4817 | CCGCUUUUGUUCUCGCAAAAA | 2617 |
| EGFR-4817 | CCGCUUUUGUUCUCGCAAA | 3397 |
| EGFR-4817 | CGCUUUUGUUCUCGCAAAA | 3137 |
| EGFR-4817 | GCUUUUGUUCUCGCAAAAA | 2877 |
| EGFR-4819 | GCUUUUGUUCUCGCAAAAACGUAUCUC | 2247 |
| EGFR-4819 | GCUUUUGUUCUCGCAAAAACG | 2619 |
| EGFR-4819 | GCUUUUGUUCUCGCAAAAA | 3399 |
| EGFR-4819 | CUUUUGUUCUCGCAAAAAC | 3139 |
| EGFR-4819 | UUUUGUUCUCGCAAAAACG | 2879 |
| EGFR-4953 | CAAAAUUAGUUUGUGUUACUUAUGGAA | 2249 |
| EGFR-4953 | CAAAAUUAGUUUGUGUUACUU | 2621 |
| EGFR-4953 | CAAAAUUAGUUUGUGUUAC | 3401 |
| EGFR-4953 | AAAAUUAGUUUGUGUUACU | 3141 |
| EGFR-4953 | AAAUUAGUUUGUGUUACUU | 2881 |
| EGFR-4970 | ACUUAUGGAAGAUAGUUUUCUCCUUUU | 2250 |
| EGFR-4970 | ACUUAUGGAAGAUAGUUUUCU | 2622 |
| EGFR-4970 | ACUUAUGGAAGAUAGUUUU | 3402 |
| EGFR-4970 | CUUAUGGAAGAUAGUUUUC | 3142 |
| EGFR-4970 | UUAUGGAAGAUAGUUUUCU | 2882 |
| EGFR-5003 | CUUCAAAAGCUUUUUACUCAAAGAGUA | 2251 |
| EGFR-5003 | CUUCAAAAGCUUUUUACUCAA | 2623 |
| EGFR-5003 | CUUCAAAAGCUUUUUACUC | 3403 |
| EGFR-5003 | UUCAAAAGCUUUUUACUCA | 3143 |
| EGFR-5003 | UCAAAAGCUUUUUACUCAA | 2883 |
| EGFR-5206 | AAACUAGGGUUUGAAAUUGAUAAUGCU | 2252 |
| EGFR-5206 | AAACUAGGGUUUGAAAUUGAU | 2624 |
| EGFR-5206 | AAACUAGGGUUUGAAAUUG | 3404 |
| EGFR-5206 | AACUAGGGUUUGAAAUUGA | 3144 |
| EGFR-5206 | ACUAGGGUUUGAAAUUGAU | 2884 |

TABLE 17
Select EGFR mRNA Target Sequences of dsRNAs

| Human EGFR | | |
|---|---|---|
| Duplex | Target mRNA Sequence | SEQ ID NO: |
| EGFR-2915 | GGCAUUGGAAUCAAUUUUACACAGAAU | 2199 |
| EGFR-2915 | GGCAUUGGAAUCAAUUUUACA | 2571 |
| EGFR-2915 | GGCAUUGGAAUCAAUUUUA | 3351 |
| EGFR-2915 | GCAUUGGAAUCAAUUUUAC | 3091 |
| EGFR-2915 | CAUUGGAAUCAAUUUUACA | 2831 |
| EGFR-4455 | GCCGGAUCGGUACUGUAUCAAGUCAUG | 2232 |
| EGFR-4455 | GCCGGAUCGGUACUGUAUCAA | 2604 |
| EGFR-4455 | GCCGGAUCGGUACUGUAUC | 3384 |
| EGFR-4455 | CCGGAUCGGUACUGUAUCA | 3124 |
| EGFR-4455 | CGGAUCGGUACUGUAUCAA | 2864 |
| EGFR-4550 | UCCUUAGACUUACUUUUGUAAAAAUGU | 2233 |
| EGFR-4550 | UCCUUAGACUUACUUUUGUAA | 2605 |
| EGFR-4550 | UCCUUAGACUUACUUUUGU | 3385 |
| EGFR-4550 | CCUUAGACUUACUUUUGUA | 3125 |
| EGFR-4550 | CUUAGACUUACUUUUGUAA | 2865 |
| EGFR-4813 | AGCACCGCUUUUGUUCUCGCAAAAACG | 2243 |
| EGFR-4813 | AGCACCGCUUUUGUUCUCGCA | 2615 |
| EGFR-4813 | AGCACCGCUUUUGUUCUCG | 3395 |
| EGFR-4813 | GCACCGCUUUUGUUCUCGC | 3135 |
| EGFR-4813 | CACCGCUUUUGUUCUCGCA | 2875 |
| EGFR-5003 | CUUCAAAAGCUUUUUACUCAAAGAGUA | 2251 |
| EGFR-5003 | CUUCAAAAGCUUUUUACUCAA | 2623 |
| EGFR-5003 | CUUCAAAAGCUUUUUACUC | 3403 |
| EGFR-5003 | UUCAAAAGCUUUUUACUCA | 3143 |
| EGFR-5003 | UCAAAAGCUUUUUACUCAA | 2883 |

TABLE 18
Additional Select EGFR mRNA Target Sequences of
dsRNAs

| Human EGFR | | |
|---|---|---|
| Duplex | Target mRNA Sequence | SEQ ID NO: |
| EGFR-1330 | CUACGAAUAUUAAACACUUCAAAAACU | 2162 |
| EGFR-1330 | CUACGAAUAUUAAACACUUCA | 2534 |
| EGFR-1330 | CUACGAAUAUUAAACACUU | 3314 |
| EGFR-1330 | UACGAAUAUUAAACACUUC | 3054 |
| EGFR-1330 | ACGAAUAUUAAACACUUCA | 2794 |
| EGFR-4450 | AGCAGGCCGGAUCGGUACUGUAUCAAG | 2231 |
| EGFR-4450 | AGCAGGCCGGAUCGGUACUGU | 2603 |
| EGFR-4450 | AGCAGGCCGGAUCGGUACU | 3383 |
| EGFR-4450 | GCAGGCCGGAUCGGUACUG | 3123 |
| EGFR-4450 | CAGGCCGGAUCGGUACUGU | 2863 |
| EGFR-4811 | AUAGCACCGCUUUUGUUCUCGCAAAAA | 2241 |
| EGFR-4811 | AUAGCACCGCUUUUGUUCUCG | 2613 |
| EGFR-4811 | AUAGCACCGCUUUUGUUCU | 3393 |
| EGFR-4811 | UAGCACCGCUUUUGUUCUC | 3133 |
| EGFR-4811 | AGCACCGCUUUUGUUCUCG | 2873 |
| EGFR-4812 | UAGCACCGCUUUUGUUCUCGCAAAAAC | 2242 |
| EGFR-4812 | UAGCACCGCUUUUGUUCUCGC | 2614 |
| EGFR-4812 | UAGCACCGCUUUUGUUCUC | 3394 |
| EGFR-4812 | AGCACCGCUUUUGUUCUCG | 3134 |
| EGFR-4812 | GCACCGCUUUUGUUCUCGC | 2874 |
| EGFR-4817 | CCGCUUUUGUUCUCGCAAAAACGUAUC | 2245 |
| EGFR-4817 | CCGCUUUUGUUCUCGCAAAAA | 2617 |
| EGFR-4817 | CCGCUUUUGUUCUCGCAAA | 3397 |
| EGFR-4817 | CGCUUUUGUUCUCGCAAAA | 3137 |
| EGFR-4817 | GCUUUUGUUCUCGCAAAAA | 2877 |

TABLE 19
Further Select EGFR mRNA Target Sequences of
dsRNAs

| Human EGFR | | |
|---|---|---|
| Duplex | Target mRNA Sequence | SEQ ID NO: |
| EGFR-878 | AGGAGAGGAGAACUGCCAGAAACUGAC | 2284 |
| EGFR-878 | AGGAGAGGAGAACUGCCAGAA | 2656 |
| EGFR-878 | AGGAGAGGAGAACUGCCAG | 3436 |
| EGFR-878 | GGAGAGGAGAACUGCCAGA | 3176 |
| EGFR-878 | GAGAGGAGAACUGCCAGAA | 2916 |
| EGFR-1286 | CGGAAUAGGUAUUGGUGAAUUUAAAGA | 2161 |
| EGFR-1286 | CGGAAUAGGUAUUGGUGAAUU | 2533 |
| EGFR-1286 | CGGAAUAGGUAUUGGUGAA | 3313 |
| EGFR-1286 | GGAAUAGGUAUUGGUGAAU | 3053 |
| EGFR-1286 | GAAUAGGUAUUGGUGAAUU | 2793 |
| EGFR-1679 | GUGCUAUGCAAAUACAAUAAACUGGAA | 2166 |
| EGFR-1679 | GUGCUAUGCAAAUACAAUAAA | 2538 |
| EGFR-1679 | GUGCUAUGCAAAUACAAUA | 3318 |
| EGFR-1679 | UGCUAUGCAAAUACAAUAA | 3058 |
| EGFR-1679 | GCUAUGCAAAUACAAUAAA | 2798 |
| EGFR-4249 | CGCUAUUGAUUUUUACUUCAAUGGGCU | 2217 |
| EGFR-4249 | CGCUAUUGAUUUUUACUUCAA | 2589 |
| EGFR-4249 | CGCUAUUGAUUUUUACUUC | 3369 |
| EGFR-4249 | GCUAUUGAUUUUUACUUCA | 3109 |
| EGFR-4249 | CUAUUGAUUUUUACUUCAA | 2849 |
| EGFR-4819 | GCUUUUGUUCUCGCAAAAACGUAUCUC | 2247 |
| EGFR-4819 | GCUUUUGUUCUCGCAAAAACG | 2619 |
| EGFR-4819 | GCUUUUGUUCUCGCAAAAA | 3399 |
| EGFR-4819 | CUUUUGUUCUCGCAAAAAC | 3139 |
| EGFR-4819 | UUUUGUUCUCGCAAAAACG | 2879 |
| EGFR-5206 | AAACUAGGGUUUGAAAUUGAUAAUGCU | 2252 |
| EGFR-5206 | AAACUAGGGUUUGAAAUUGAU | 2624 |
| EGFR-5206 | AAACUAGGGUUUGAAAUUG | 3404 |
| EGFR-5206 | AACUAGGGUUUGAAAUUGA | 3144 |
| EGFR-5206 | ACUAGGGUUUGAAAUUGAU | 2884 |

TABLE 20
Additional Selected EGFR mRNA Target Sequences
of dsRNAs

| Human EGFR | | |
|---|---|---|
| Duplex | Target mRNA Sequence | SEQ ID NO: |
| EGFR-390 | CAGUUGGGCACUUUUGAAGAUCAUUUU | 2143 |
| EGFR-1271 | CCGCAAAGUGUGUAACGGAAUAGGUAU | 2160 |
| EGFR-1563 | AAGCAACAUGGUCAGUUUUCUCUUGCA | 2307 |
| EGFR-2462 | CUGGAUCCCAGAAGGUGAGAAAGUUAA | 2322 |
| EGFR-2464 | GGAUCCCAGAAGGUGAGAAAGUUAAAA | 2324 |
| EGFR-3111 | AUGGUCAAGUGCUGGAUGAUAGACGCA | 2379 |
| EGFR-3112 | UGGUCAAGUGCUGGAUGAUAGACGCAG | 2380 |
| EGFR-3223 | AUGAAAGAAUGCAUUUGCCAAGUCCUA | 2387 |
| EGFR-4806 | UAAGGAUAGCACCGCUUUUGUUCUCGC | 2236 |

TABLE 21
More Selected EGFR mRNA Target Sequences of dsRNAs

| Human EGFR | | |
|---|---|---|
| Duplex | Target mRNA Sequence | SEQ ID NO: |
| EGFR-458 | UGGGAAUUUGGAAAUUACCUAUGUGCA | 2144 |
| EGFR-458 | UGGGAAUUUGGAAAUUACCUA | 2516 |
| EGFR-458 | UGGGAAUUUGGAAAUUACC | 3296 |
| EGFR-4970 | ACUUAUGGAAGAUAGUUUUCUCCUUUU | 2250 |
| EGFR-4970 | ACUUAUGGAAGAUAGUUUUCU | 2622 |
| EGFR-4970 | ACUUAUGGAAGAUAGUUUU | 3402 |

TABLE 22
Further Selected EGFR mRNA Target Sequences
of dsRNAs

| Human EGFR | | |
|---|---|---|
| Duplex | Target mRNA Sequence | SEQ ID NO: |
| EGFR-4809 | GGAUAGCACCGCUUUUGUUCUCGCAAA | 2239 |
| EGFR-4809 | GGAUAGCACCGCUUUUGUUCU | 2611 |
| EGFR-4809 | GAUAGCACCGCUUUUGUUC | 3131 |
| EGFR-4809 | AUAGCACCGCUUUUGUUCU | 2871 |
| EGFR-4953 | CAAAAUUAGUUUGUGUUACUUAUGGAA | 2249 |
| EGFR-4953 | CAAAAUUAGUUUGUGUUACUU | 2621 |
| EGFR-4953 | AAAAUUAGUUUGUGUUACU | 3141 |
| EGFR-4953 | AAAUUAGUUUGUGUUACUU | 2881 |

TABLE 23
Additional EGFR mRNA Target Sequences of dsRNAs

| Human EGFR | | |
|---|---|---|
| Duplex | Target mRNA Sequence | SEQ ID NO: |
| EGFR-1313 | CUCACUCUCCAUAAAUGCUACGAAUAU | 2296 |
| EGFR-1313 | CUCACUCUCCAUAAAUGCUAC | 2668 |
| EGFR-1313 | CUCACUCUCCAUAAAUGCU | 3448 |
| EGFR-1313 | UCACUCUCCAUAAAUGCUA | 3188 |
| EGFR-2458 | GACUCUGGAUCCCAGAAGGUGAGAAAG | 2318 |
| EGFR-2458 | GACUCUGGAUCCCAGAAGGUG | 2690 |
| EGFR-2458 | GACUCUGGAUCCCAGAAGG | 3470 |
| EGFR-2458 | ACUCUGGAUCCCAGAAGGU | 3210 |

TABLE 24
More EGFR mRNA Target Sequences of dsRNAs

| Human EGFR Duplex | Target mRNA Sequence | SEQ ID NO: |
|---|---|---|
| EGFR-390 | CAGUUGGGCACUUUUGAAGAU | 2515 |
| EGFR-390 | CAGUUGGGCACUUUUGAAG | 3295 |
| EGFR-390 | AGUUGGGCACUUUUGAAGA | 3035 |
| EGFR-390 | GUUGGGCACUUUUGAAGAU | 2775 |
| EGFR-1563 | AAGCAACAUGGUCAGUUUUCU | 2679 |
| EGFR-1563 | AAGCAACAUGGUCAGUUUU | 3459 |
| EGFR-1563 | AGCAACAUGGUCAGUUUUC | 3199 |
| EGFR-1563 | GCAACAUGGUCAGUUUUCU | 2939 |
| EGFR-2462 | CUGGAUCCCAGAAGGUGAGAA | 2694 |
| EGFR-2462 | CUGGAUCCCAGAAGGUGAG | 3474 |
| EGFR-2462 | UGGAUCCCAGAAGGUGAGA | 3214 |
| EGFR-2462 | GGAUCCCAGAAGGUGAGAA | 2954 |
| EGFR-3111 | AUGGUCAAGUGCUGGAUGAUA | 2751 |
| EGFR-3111 | AUGGUCAAGUGCUGGAUGA | 3531 |
| EGFR-3111 | UGGUCAAGUGCUGGAUGAU | 3271 |
| EGFR-3111 | GGUCAAGUGCUGGAUGAUA | 3011 |
| EGFR-3112 | UGGUCAAGUGCUGGAUGAUAG | 2752 |
| EGFR-3112 | UGGUCAAGUGCUGGAUGAU | 3532 |
| EGFR-3112 | GGUCAAGUGCUGGAUGAUA | 3272 |
| EGFR-3112 | GUCAAGUGCUGGAUGAUAG | 3012 |
| EGFR-3223 | AUGAAAGAAUGCAUUUGCCAA | 2759 |
| EGFR-3223 | AUGAAAGAAUGCAUUUGCC | 3539 |
| EGFR-3223 | UGAAAGAAUGCAUUUGCCA | 3279 |
| EGFR-3223 | GAAAGAAUGCAUUUGCCAA | 3019 |
| EGFR-4806 | UAAGGAUAGCACCGCUUUUGU | 2608 |
| EGFR-4806 | UAAGGAUAGCACCGCUUUU | 3388 |
| EGFR-4806 | AAGGAUAGCACCGCUUUUG | 3128 |
| EGFR-4806 | AGGAUAGCACCGCUUUUGU | 2868 |

TABLE 25
Additional mRNA Target Sequences of EGFR
Inhibiting dsRNAs

| Human EGFR Duplex | Target mRNA Sequence | SEQ ID NO: |
|---|---|---|
| EGFR-458 | GGAAUUUGGAAAUUACCUA | 2776 |
| EGFR-4970 | UUAUGGAAGAUAGUUUUCU | 2882 |

TABLE 26
Further mRNA Target Sequences of EGFR
Inhibiting dsRNAs

| Human EGFR Duplex | Target mRNA Sequence | SEQ ID NO: |
|---|---|---|
| EGFR-4809 | GGAUAGCACCGCUUUUGUU | 3391 |
| EGFR-4953 | CAAAAUUAGUUUGUGUUAC | 3401 |

### Example 4

### Modified Forms of EGFR-Targeting DsiRNAs Reduced EGFR Levels in Vitro

[0418] 32 EGFR-targeting DsiRNAs (EGFR-878, EGFR-1313, EGFR-1563, EGFR-2458, EGFR-2462, EGFR-2464, EGFR-3111, EGFR-3112, EGFR-3223, EGFR-390, EGFR-458, EGFR-1271, EGFR-1286, EGFR-1330, EGFR-1679, EGFR-2915, EGFR-4249, EGFR-4450, EGFR-4455, EGFR-4550, EGFR-4806, EGFR-4809, EGFR-4811, EGFR-4812, EGFR-4813, EGFR-4817, EGFR-4819, EGFR-4953, EGFR-4970, EGFR-5003, EGFR-5206 and EGFR-m3474) were prepared with 2′-O-methyl modification patterns as shown in FIG. 4A. For each of the 32 DsiRNA sequences, DsiRNAs possessing each of the six modification patterns were assayed for EGFR inhibition in human HeLa cells at 0.1 nM (in parallel assays) and 1.0 nM concentrations in the environment of the HeLa cells. Results of these experiments are presented as histograms in FIGS. 4B to 4I. In general, the 32 DsiRNA sequences exhibited a trend towards reduced efficacy of EGFR inhibition as the extent of 2′-O-methyl modification of the guide strand increased. However, for almost all DsiRNA sequences examined, a modification pattern could be identified that allowed the DsiRNA to retain significant EGFR inhibitory efficacy in vitro. It was also notable that many DsiRNAs (e.g., EGFR-1286, EGFR-4249, EGFR-4550, EGFR-4806, EGFR-4813, EGFR-4817, EGFR-4819, EGFR-4953, EGFR-4970, EGFR-5003 and EGFR-5206) exhibited robust EGFR inhibitory efficacy in even the most highly modified states examined (e.g., the M1 modification pattern). These data confirm that it is possible to identify effective DsiRNA sequences possessing high levels of modification, a trait advantageous for stabilizing such DsiRNAs and/or reducing immunogenicity of such DsiRNAs when therapeutically administered to a subject in vivo.

### Example 5

### Dose-Response of Selected EGFR-Targeting DsiRNAs

[0419] Six EGFR-targeting DsiRNAs were selected for assessment of dose-response characteristics in vitro in NCI-H1975 mammalian cells. The six duplexes assessed for dose-response were EGFR-390-M0/M35, EGFR-2915-M0/M35, EGFR-4806-M0/M35, EGFR-4806-M0/M25, EGFR-4249-M0/M25 and EGFR-4249-M0/M1 (where modifications of the duplexes are indicated as “passenger strand modification pattern/guide strand modification pattern”). As shown in FIG. 5, sub-nanomolar IC₅₀ values were observed for all six such duplexes—indeed, single digit picomolar and even sub-picomolar IC₅₀ values were observed. Thus, EGFR-targeting DsiRNAs were further demonstrated to be remarkably potent and effective inhibitors of EGFR expression.

### Example 6

### EGFR-Targeting DsiRNAs Selectively Inhibited NSCLC Cell Line Growth

[0420] In this Example, EGFR-targeting DsiRNAs EGFR-4249 M25 and EGFR-4806 M25 (note: modification pattern M25 was present on the guide strand of each of the preceding DsiRNAs) were examined for the ability to inhibit growth of tumor cell lines in vitro. Specifically, non-small cell lung cancer (NSCLC) cell lines NCI-H1975 (an erlotinib resistant NSCLC line), NCI-H292 (comprising a KRAS mutation), NCI-H460 (comprising a KRAS mutation) and A549 were examined for both EGFR mRNA knockdown and inhibition of cell growth following administration of EGFR-targeting DsiRNAs. As shown for NCI-H1975 in FIG. 6, EGFR-targeting DsiRNAs EGFR-4249 M25 and EGFR-4806 M25 not only reduced expression levels of EGFR mRNA by 60% to 80% or more in NCI-H1795 cells, but also exhibited a dose-dependent inhibition of NCI-H1795 cell growth at tested 3 nM and 10 nM concentrations. Notably, the magnitude of NCI-H1795 cell growth inhibition was approximately 20% for cells administered either DsiRNA at 3 nM, while cell growth was inhibited by 40% to 50% when either DsiRNA was administered at 10 nM. The growth inhibition result observed for NCI-H1795 cells was particularly striking, in view of the lack of observation of such a growth inhibition effect in any of NCI-H292, NCI-H460 and A549 cells (data not shown; in each case, effective EGFR mRNA knockdown was confirmed, but no corresponding growth inhibition was observed). Accordingly, EGFR-targeting duplexes were observed to be effective inhibitors of tumor cell growth, at least in the instance of the erlotinib-resistant NCI-H1975 NSCLC cell line.

### Example 7

### EGFR-Targeting DsiRNAs Reduce EGFR Protein Levels in Vitro

[0421] The impact of an EGFR-targeting DsiRNA upon cellular protein levels is examined in vitro. Specifically, one of the above EGFR-targeting DsiRNAs possessing a 2′-O-methyl modification pattern as shown herein is delivered to human HeLa cells and is shown to dramatically reduce EGFR protein levels. In such experiments, DsiRNA transfection of HeLa cells can occur on day 0 at 10 nM concentration. On day 2, HeLa cells are harvested and cellular proteins are isolated for Western blot analysis. A Western blot is then probed with anti-EGFR antibody, with appropriate control protein levels assayed for purpose of normalization of EGFR protein levels between samples. A non-specific, scrambled control DsiRNA can also be run in parallel for normalization purposes. Significant knockdown of EGFR protein levels is observed for the assayed DsiRNA and is seen to correlate with EGFR mRNA knockdown.

### Example 8

### Further DsiRNA Inhibition of EGFR

[0422] DsiRNA molecules selected from Table 2 above that target EGFR wild-type sequences are designed and synthesized as described above and tested in HeLa cells for inhibitory efficacy as described in Examples 1, 2, 3, 4, 5 or 6 above. The ability of these DsiRNA agents to inhibit EGFR expression is assessed in comparison to corresponding EGFR target sequence-directed 21mer siRNAs (tested anti-EGFR 21mer agents are designed with antisense strands complementary to the 21 nucleotide target sequences as shown in Table 6 above corresponding to tested DsiRNA agents; FIG. 1 also presents a comparison of structures used in such experiments). Instances in which the DsiRNA of a DsiRNA-cognate siRNA pair outperforms the corresponding siRNA are identified (e.g., at 24 hours post-administration, at concentrations of 0.1 nM). Such results demonstrate that DsiRNA activities do not directly correlate with siRNA activities, nor does the converse hold. Accordingly, such results demonstrate that DsiRNAs and siRNAs engage the RNA interference machinery differently, and that DsiRNAs and siRNAs—in spite of both comprising double-stranded RNA—are, in fact, different drugs.

### Example 9

### In Vivo Efficacy of EGFR-Targeting DsiRNAs in Targeted Tissues

[0423] To test the activity of a DsiRNA directed against EGFR in vivo, CD1 male mice are administered an EGFR-targeting DsiRNA. Mice are treated by i.v. tail vein injection with either 5% glucose (control vehicle), a control DsiRNA, or the EGFR-targeting DsiRNA. DsiRNAs are formulated in InVivoFectamine™ (InVitrogen) or other appropriate formulation, and are administered at a dose of, e.g., 10 mg/kg body weight per administration (administered on two days separated by one non-dosing day). Three days after the last administration, animals are sacrificed and tissues of interest (e.g., lung, colon, liver, spleen, kidney, etc.) are harvested. For RNA expression analysis, RNA is isolated from tissue lysates using a Promega™ SV96 RNA isolation kit. RNA is reverse-transcribed, and then Taqman quantitative PCR is performed on a BioRad CFX96, in multiplex using primer and probe sets specific for EGFR and a housekeeping gene (e.g., GAPDH) for normalization. The in vivo knockdown efficacy of EGFR in harvested tissues is thereby assessed and confirmed.

### Example 10

### Indications

[0424] The present body of knowledge in EGFR research indicates the need for methods to assay EGFR activity and for compounds that can regulate EGFR expression for research, diagnostic, and therapeutic use. As described herein, the nucleic acid molecules of the present invention can be used in assays to diagnose disease state related to EGFR levels. In addition, the nucleic acid molecules can be used to treat disease state related to EGFR misregulation, levels, etc.

[0425] Particular disorders and disease states that can be associated with EGFR expression modulation include, but are not limited to cancer and/or proliferative diseases, conditions, or disorders and other diseases, conditions or disorders that are related to or will respond to the levels of EGFR in a cell or tissue, alone or in combination with other therapies. Particular disease or disorder states that are associated with EGFR expression modulation include but are not limited to, for example, colorectal cancer, lung cancer, squamous cell carcinoma (e.g., of the head and neck (SCCHN), renal cancer, breast cancer, bladder cancer, ovarian cancer, cervical cancer, esophageal cancer, gastric cancer, endometrial cancer, oropharyngeal cancer, and pancreatic cancer.

[0426] Gemcitabine and cyclophosphamide are non-limiting examples of chemotherapeutic agents that can be combined with or used in conjunction with the nucleic acid molecules (e.g. DsiRNA molecules) of the instant invention. Those skilled in the art will recognize that other drugs such as anti-cancer compounds and therapies can similarly be readily combined with the nucleic acid molecules of the instant invention (e.g. DsiRNA molecules) and are hence within the scope of the instant invention. Such compounds and therapies are well known in the art (see for example Cancer: Principles and Practice of Oncology, Volumes 1 and 2, eds Devita, V. T., Hellman, S., and Rosenberg, S. A., J. B. Lippincott Company, Philadelphia, USA) and include, without limitations, antifolates; fluoropyrimidines; cytarabine; purine analogs; adenosine analogs; amsacrine; topoisomerase I inhibitors; anthrapyrazoles; retinoids; antibiotics such as bleomycin, anthacyclins, mitomycin C, dactinomycin, and mithramycin; hexamethylmelamine; dacarbazine; 1-asperginase; platinum analogs; alkylating agents such as nitrogen mustard, melphalan, chlorambucil, busulfan, ifosfamide, 4-hydroperoxycyclophosphamide, nitrosoureas, thiotepa; plant derived compounds such as vinca alkaloids, epipodophyllotoxins, taxol; Tamoxifen; radiation therapy; surgery; nutritional supplements; gene therapy; radiotherapy such as 3D-CRT; immunotoxin therapy such as ricin, monoclonal antibodies Herceptin; and the like.

[0427] For EGFR in particular, various monoclonal antibody and small molecule inhibitors that target EGFR have been described, and can be combined with the nucleic acids of the instant invention: such EGFR-targeting agents include, e.g., cetuximab, panitumumab, zalutumumab, nimotuzumab, matuzumab, gefitinib, erlotinib and lapatinib (mixed EGFR and ERBB2 inhibitor).

[0428] For combination therapy, the nucleic acids of the invention can be prepared in at least one of two ways. First, the agents can be physically combined in a preparation of nucleic acid and chemotherapeutic agent, such as a mixture of a nucleic acid of the invention encapsulated in liposomes and ifosfamide in a solution for intravenous administration, wherein both agents are present in a therapeutically effective concentration (e.g., ifosfamide in solution to deliver 1000-1250 mg/m2/day and liposome-associated nucleic acid of the invention in the same solution to deliver 0.1-100 mg/kg/day). Alternatively, the agents are administered separately but simultaneously in their respective effective doses (e.g., 1000-1250 mg/m2/d ifosfamide and 0.1 to 100 mg/kg/day nucleic acid of the invention).

[0429] Those skilled in the art will recognize that other compounds and therapies used to treat the diseases and conditions described herein can similarly be combined with the nucleic acid molecules of the instant invention (e.g. siNA molecules) and are hence within the scope of the instant invention.

### Example 11

### Serum Stability for DsiRNAs

[0430] Serum stability of DsiRNA agents is assessed via incubation of DsiRNA agents in 50% fetal bovine serum for various periods of time (up to 24 h) at 37° C. Serum is extracted and the nucleic acids are separated on a 20% non-denaturing PAGE and can be visualized with Gelstar stain. Relative levels of protection from nuclease degradation are assessed for DsiRNAs (optionally with and without modifications).

### Example 12

### Use of Additional Cell Culture Models to Evaluate the Down-Regulation of EGFR Gene Expression

[0431] A variety of endpoints have been used in cell culture models to look at EGFR-mediated effects after treatment with anti-EGFR agents. Phenotypic endpoints include inhibition of cell proliferation, RNA expression, and reduction of EGFR protein expression. Because EGFR mutations are directly associated with increased proliferation of certain tumor cells, a proliferation endpoint for cell culture assays is can be used as a screen. There are several methods by which this endpoint can be measured. Following treatment of cells with DsiRNA, cells are allowed to grow (typically 5 days), after which the cell viability, the incorporation of bromodeoxyuridine (BrdU) into cellular DNA and/or the cell density are measured. The assay of cell density can be done in a 96-well format using commercially available fluorescent nucleic acid stains (such as Syto® 13 or CyQuant®). As a secondary, confirmatory endpoint, a DsiRNA-mediated decrease in the level of EGFR protein expression can be evaluated using an EGFR-specific ELISA.

### Example 13

### Evaluation of Anti-EGFR DsiRNA Efficacy in a Mouse Model of EGFR Misregulation

[0432] Anti-EGFR DsiRNA chosen from in vitro assays can be further tested in mouse models, including, e.g., xenograft and other animal models as recited above. In one example, mice possessing misregulated (e.g., elevated) EGFR levels are administered a DsiRNA agent of the present invention via hydrodynamic tail vein injection. 3-4 mice per group (divided based upon specific DsiRNA agent tested) are injected with 50 μg or 200 μg of DsiRNA. Levels of EGFR RNA are evaluated using RT-qPCR. Additionally or alternatively, levels of EGFR (e.g., EGFR protein levels or activity and/or cancer cell/tumor formation, growth or spread) can be evaluated using an art-recognized method, or phenotypes associated with misregulation of EGFR (e.g., tumor formation, growth, metastasis, etc.) are monitored (optionally as a proxy for measurement of EGFR transcript or EGFR protein levels). Active DsiRNA in such animal models can also be subsequently tested in combination with standard chemotherapies.

### Example 14

### Diagnostic Uses

[0433] The DsiRNA molecules of the invention can be used in a variety of diagnostic applications, such as in the identification of molecular targets (e.g., RNA) in a variety of applications, for example, in clinical, industrial, environmental, agricultural and/or research settings. Such diagnostic use of DsiRNA molecules involves utilizing reconstituted RNAi systems, for example, using cellular lysates or partially purified cellular lysates. DsiRNA molecules of this invention can be used as diagnostic tools to examine genetic drift and mutations within diseased cells. The close relationship between DsiRNA activity and the structure of the target EGFR RNA allows the detection of mutations in a region of the EGFR molecule, which alters the base-pairing and three-dimensional structure of the target EGFR RNA. By using multiple DsiRNA molecules described in this invention, one can map nucleotide changes, which are important to RNA structure and function in vitro, as well as in cells and tissues. Cleavage of target EGFR RNAs with DsiRNA molecules can be used to inhibit gene expression and define the role of specified gene products in the progression of an EGFR-associated disease or disorder. In this manner, other genetic targets can be defined as important mediators of the disease. These experiments will lead to better treatment of the disease progression by affording the possibility of combination therapies (e.g., multiple DsiRNA molecules targeted to different genes, DsiRNA molecules coupled with known small molecule inhibitors, or intermittent treatment with combinations of DsiRNA molecules and/or other chemical or biological molecules). Other in vitro uses of DsiRNA molecules of this invention are well known in the art, and include detection of the presence of RNAs associated with a disease or related condition. Such RNA is detected by determining the presence of a cleavage product after treatment with a DsiRNA using standard methodologies, for example, fluorescence resonance emission transfer (FRET).

[0434] In a specific example, DsiRNA molecules that cleave only wild-type or mutant or polymorphic forms of the target EGFR RNA are used for the assay. The first DsiRNA molecules (i.e., those that cleave only wild-type forms of target EGFR RNA) are used to identify wild-type EGFR RNA present in the sample and the second DsiRNA molecules (i.e., those that cleave only mutant or polymorphic forms of target RNA) are used to identify mutant or polymorphic EGFR RNA in the sample. As reaction controls, synthetic substrates of both wild-type and mutant or polymorphic EGFR RNA are cleaved by both DsiRNA molecules to demonstrate the relative DsiRNA efficiencies in the reactions and the absence of cleavage of the “non-targeted” EGFR RNA species. The cleavage products from the synthetic substrates also serve to generate size markers for the analysis of wild-type and mutant EGFR RNAs in the sample population. Thus, each analysis requires two DsiRNA molecules, two substrates and one unknown sample, which is combined into six reactions. The presence of cleavage products is determined using an RNase protection assay so that full-length and cleavage fragments of each EGFR RNA can be analyzed in one lane of a polyacrylamide gel. It is not absolutely required to quantify the results to gain insight into the expression of mutant or polymorphic EGFR RNAs and putative risk of EGFR-associated phenotypic changes in target cells. The expression of EGFR mRNA whose protein product is implicated in the development of the phenotype (i.e., disease related/associated) is adequate to establish risk. If probes of comparable specific activity are used for both transcripts, then a qualitative comparison of EGFR RNA levels is adequate and decreases the cost of the initial diagnosis. Higher mutant or polymorphic form to wild-type ratios are correlated with higher risk whether EGFR RNA levels are compared qualitatively or quantitatively.

[0435] All patents and publications mentioned in the specification are indicative of the levels of skill of those skilled in the art to which the invention pertains. All references cited in this disclosure are incorporated by reference to the same extent as if each reference had been incorporated by reference in its entirety individually.

[0436] One skilled in the art would readily appreciate that the present invention is well adapted to carry out the objects and obtain the ends and advantages mentioned, as well as those inherent therein. The methods and compositions described herein as presently representative of preferred embodiments are exemplary and are not intended as limitations on the scope of the invention. Changes therein and other uses will occur to those skilled in the art, which are encompassed within the spirit of the invention, are defined by the scope of the claims.

[0437] It will be readily apparent to one skilled in the art that varying substitutions and modifications can be made to the invention disclosed herein without departing from the scope and spirit of the invention. Thus, such additional embodiments are within the scope of the present invention and the following claims. The present invention teaches one skilled in the art to test various combinations and/or substitutions of chemical modifications described herein toward generating nucleic acid constructs with improved activity for mediating RNAi activity. Such improved activity can comprise improved stability, improved bioavailability, and/or improved activation of cellular responses mediating RNAi. Therefore, the specific embodiments described herein are not limiting and one skilled in the art can readily appreciate that specific combinations of the modifications described herein can be tested without undue experimentation toward identifying DsiRNA molecules with improved RNAi activity.

[0438] The invention illustratively described herein suitably can be practiced in the absence of any element or elements, limitation or limitations that are not specifically disclosed herein. Thus, for example, in each instance herein any of the terms “comprising”, “consisting essentially of”, and “consisting of” may be replaced with either of the other two terms. The terms and expressions which have been employed are used as terms of description and not of limitation, and there is no intention that in the use of such terms and expressions of excluding any equivalents of the features shown and described or portions thereof, but it is recognized that various modifications are possible within the scope of the invention claimed. Thus, it should be understood that although the present invention has been specifically disclosed by preferred embodiments, optional features, modification and variation of the concepts herein disclosed may be resorted to by those skilled in the art, and that such modifications and variations are considered to be within the scope of this invention as defined by the description and the appended claims.

[0439] In addition, where features or aspects of the invention are described in terms of Markush groups or other grouping of alternatives, those skilled in the art will recognize that the invention is also thereby described in terms of any individual member or subgroup of members of the Markush group or other group.

[0440] The use of the terms “a” and “an” and “the” and similar referents in the context of describing the invention (especially in the context of the following claims) are to be construed to cover both the singular and the plural, unless otherwise indicated herein or clearly contradicted by context. The terms “comprising,” “having,” “including,” and “containing” are to be construed as open-ended terms (i.e., meaning “including, but not limited to,”) unless otherwise noted. Recitation of ranges of values herein are merely intended to serve as a shorthand method of referring individually to each separate value falling within the range, unless otherwise indicated herein, and each separate value is incorporated into the specification as if it were individually recited herein. All methods described herein can be performed in any suitable order unless otherwise indicated herein or otherwise clearly contradicted by context. The use of any and all examples, or exemplary language (e.g., “such as”) provided herein, is intended merely to better illuminate the invention and does not pose a limitation on the scope of the invention unless otherwise claimed. No language in the specification should be construed as indicating any non-claimed element as essential to the practice of the invention.

[0441] Embodiments of this invention are described herein, including the best mode known to the inventors for carrying out the invention. Variations of those embodiments may become apparent to those of ordinary skill in the art upon reading the foregoing description.

[0442] The inventors expect skilled artisans to employ such variations as appropriate, and the inventors intend for the invention to be practiced otherwise than as specifically described herein. Accordingly, this invention includes all modifications and equivalents of the subject matter recited in the claims appended hereto as permitted by applicable law. Moreover, any combination of the above-described elements in all possible variations thereof is encompassed by the invention unless otherwise indicated herein or otherwise clearly contradicted by context. Those skilled in the art will recognize, or be able to ascertain using no more than routine experimentation, many equivalents to the specific embodiments of the invention described herein. Such equivalents are intended to be encompassed by the following claims.

1. An isolated double stranded nucleic acid (dsNA) comprising ribonucleotides, consisting of: (a) a sense region and an antisense region, wherein said sense region and said antisense region together form a duplex region consisting of 25-35 base pairs and said antisense region comprises a sequence comprising at least 15 contiguous nucleotides that are complementary to a sequence selected from Table 17; and (b) from zero to two 3′ overhang regions, wherein each overhang region is six or fewer nucleotides in length.

2. An isolated dsNA comprising ribonucleotides, consisting of: (a) a sense region and an antisense region, wherein said sense region and said antisense region together form a duplex region consisting of 25-35 base pairs and said antisense region comprises a sequence comprising at least 19 contiguous nucleotides that are complementary to a sequence selected from Tables 17 and 18; and (b) from zero to two 3′ overhang regions, wherein each overhang region is six or fewer nucleotides in length.

3. An isolated dsNA comprising ribonucleotides, consisting of: (a) a sense region and an antisense region, wherein said sense region and said antisense region together form a duplex region consisting of 25-35 base pairs and said antisense region comprises a sequence that is the complement of a sequence selected from Tables 17-23; and (b) from zero to two 3′ overhang regions, wherein each overhang region is six or fewer nucleotides in length.

4. An isolated dsNA comprising ribonucleotides, consisting of: (a) a sense region and an antisense region, wherein said sense region and said antisense region together form a duplex region consisting of 25-35 base pairs and said antisense region comprises a sequence that is the complement of a sequence selected from Tables 17-23; and (b) from zero to two 3′ overhang regions, wherein each overhang region is six or fewer nucleotides in length, and wherein, starting from the 5′ end (position 1) of a EGFR mRNA sequence selected from Tables 17-26 (position 1), mammalian Ago2 cleaves said mRNA at a site between positions 9 and 10 of said sequence.

5. An isolated dsNA comprising first and second nucleic acid strands comprising ribonucleotides and a duplex region of at least 25 base pairs, wherein said first strand is 25-34 nucleotides in length and comprises a 5′-terminus and a 3′-terminus and said second strand of said dsNA is 26-35 nucleotides in length and comprises a 5′-terminus and a 3′-terminus and comprises 1-5 single-stranded nucleotides at its 3′ terminus, wherein said second oligonucleotide strand is sufficiently complementary to a target EGFR mRNA sequence selected from the group consisting of Tables 17-26 and SEQ ID NOs: 2137-2396 along at least 19 nucleotides of said second oligonucleotide strand length to reduce EGFR target gene expression when said double stranded nucleic acid is introduced into a mammalian cell.

6. An isolated dsNA comprising first and second nucleic acid strands comprising ribonucleotides and a duplex region of at least 25 base pairs, wherein said first strand is 25-34 nucleotides in length and said second strand of said dsNA is 26-35 nucleotides in length and comprises 1-5 single-stranded nucleotides at its 3′ terminus, wherein the 3′ terminus of said first oligonucleotide strand and the 5′ terminus of said second oligonucleotide strand form a blunt end, and said second oligonucleotide strand is sufficiently complementary to a target EGFR sequence selected from the group consisting of Tables 17-26 and SEQ ID NOs: 2137-2396 along at least 19 nucleotides of said second oligonucleotide strand length to reduce EGFR mRNA expression when said double stranded nucleic acid is introduced into a mammalian cell.

7. The isolated dsNA of claim 1, comprising a first oligonucleotide strand comprising a 5′-terminus and a 3′-terminus and said second oligonucleotide strand comprising a 5′-terminus and a 3′-terminus.

8. The isolated dsNA of claim 7, wherein said second oligonucleotide strand comprises 1-5 single-stranded nucleotides at its 3′ terminus.

9. The isolated dsNA of claim 5, wherein said 3′ overhang is 1-3 nucleotides in length.

10. The isolated dsNA of claim 5, wherein said nucleotides of said 3′ overhang comprise a modified nucleotide.

11. The isolated dsNA of claim 10, wherein said modified nucleotide of said 3′ overhang is a 2′-O-methyl ribonucleotide.

12. The isolated dsNA of claim 10 wherein said modified nucleotide residues are selected from the group consisting of 2′-O-methyl, 2′-methoxyethoxy, 2′-fluoro, 2′-allyl, 2′-O-[2-(methylamino)-2-oxoethyl], 4′-thio, 4′-CH2-O-2′-bridge, 4′-(CH2)2-O-2′-bridge, 2′-LNA, 2′-amino and 2′-O—(N-methlycarbamate).

13. The isolated dsNA of claim 10, wherein said 3′ overhang is two nucleotides in length and wherein said modified nucleotide of said 3′ overhang is a 2′-O-methyl modified ribonucleotide.

14. The isolated dsNA of claim 5, wherein all nucleotides of said 3′ overhang are modified nucleotides.

15. The isolated dsNA of claim 1, wherein said dsNA reduces EGFR mRNA levels by at least 80% when assayed in vitro in a mammalian cell at an effective concentration in the environment of said cell of 1 nanomolar or less.

16. The isolated dsNA of claim 5, wherein said second oligonucleotide strand is complementary to target EGFR cDNA sequence NM_{—}005228.3 along at most 27 nucleotides of said second oligonucleotide strand length.

17. The isolated dsNA of claim 5, wherein said second strand comprises a sequence selected from the group consisting of SEQ ID NOs: 357-616.

18. The isolated dsNA of claim 5, wherein said first strand comprises a sequence selected from the group consisting of SEQ ID NOs: 1-260, 1069-1328, 1781-2040 and 2137-2396.

19. The isolated dsNA of claim 5 comprising a pair of first strand/second strand sequences selected from the group consisting of DsiRNA agents shown in Table 2, 3, 7 and 9.

20. The isolated dsNA of claim 5, wherein starting from the first nucleotide (position 1) at the 3′ terminus of the first oligonucleotide strand, position 1, 2 and/or 3 is substituted with a modified nucleotide.

21. The isolated dsNA of claim 20, wherein said modified nucleotide residue of said 3′ terminus of said first strand is selected from the group consisting of a deoxyribonucleotide, an acyclonucleotide and a fluorescent molecule.

22. The isolated dsNA of claim 20, wherein position 1 of said 3′ terminus of the first oligonucleotide strand is a deoxyribonucleotide.

23. The isolated dsNA of claim 5, wherein said 3′ terminus of said first strand and said 5′ terminus of said second strand form a blunt end.

24. The isolated dsNA of claim 5, wherein said first strand is 25 nucleotides in length and said second strand is 27 nucleotides in length.

25. The isolated dsNA of claim 7, wherein said second strand has a length which is at least 26 nucleotides.

26. The isolated dsNA of claim 1, wherein, starting from the 5′ end of a EGFR mRNA sequence selected from Table 16 (position 1), mammalian Ago2 cleaves said mRNA at a site between positions 9 and 10 of said sequence, thereby reducing EGFR target mRNA expression when said double stranded nucleic acid is introduced into a mammalian cell.

27. The isolated dsNA of claim 1, wherein, starting from the 5′ end of a EGFR mRNA sequence selected from Table 6, mammalian Ago2 cleaves said mRNA at a site between positions 9 and 10 of said mRNA sequence, thereby reducing EGFR target mRNA expression when said double stranded nucleic acid is introduced into a mammalian cell.

28. The isolated dsNA of claim 5, wherein each of said first and said second strands has a length which is at least 26 nucleotides.

29. The isolated dsNA of claim 1, wherein said dsNA comprises a modified nucleotide.

30. The isolated dsNA of claim 29, wherein said modified nucleotide residue is selected from the group consisting of 2′-O-methyl, 2′-methoxyethoxy, 2′-fluoro, 2′-allyl, 2′-O-[2-(methylamino)-2-oxoethyl], 4′-thio, 4′-CH2-O-2′-bridge, 4′-(CH2)2-O-2′-bridge, 2′-LNA, 2′-amino and 2′-O—(N-methlycarbamate).

31. The isolated dsNA of claim 5, wherein said second oligonucleotide strand, starting from the nucleotide residue of said second strand that is complementary to the 5′ terminal nucleotide residue of said first oligonucleotide strand, comprises alternating modified and unmodified nucleotide residues.

32. The isolated dsNA of claim 5, wherein said second oligonucleotide strand, starting from the nucleotide residue of said second strand that is complementary to the 5′ terminal nucleotide residue of said first oligonucleotide strand, comprises unmodified nucleotide residues at all positions from position 18 to the 5′ terminus of said second oligonucleotide strand.

33. The isolated dsNA of claim 5, wherein said second oligonucleotide strand comprises a modification pattern selected from the group consisting of AS-M1 to AS-M41 and AS-M1* to AS-M41*.

34. The isolated dsNA of claim 5, wherein said first oligonucleotide strand comprises a modification pattern selected from the group consisting of SM1 to SM16.

35. The isolated dsNA of claim 5, wherein each of said first and said second strands has a length which is at least 26 and at most 30 nucleotides.

36. The isolated dsNA of claim 1, wherein said dsNA is cleaved endogenously in said cell by Dicer.

37. The isolated dsNA of claim 1, wherein the amount of said isolated nucleic acid sufficient to reduce expression of the target gene is selected from the group consisting of 1 nanomolar or less, 200 picomolar or less, 100 picomolar or less, 50 picomolar or less, 20 picomolar or less, 10 picomolar or less, 5 picomolar or less, 2, picomolar or less and 1 picomolar or less in the environment of said cell.

38. The isolated dsNA of claim 2, wherein said isolated dsNA possesses greater potency than an isolated 21mer siRNA directed to the identical at least 19 nucleotides of said target EGFR mRNA in reducing target EGFR mRNA expression when assayed in vitro in a mammalian cell at an effective concentration in the environment of a cell selected from the group consisting of 1 nanomolar or less, 300 picomolar or less, 200 picomolar or less, 100 picomolar or less, 50 picomolar or less, 20 picomolar or less, 10 picomolar or less, 5 picomolar or less, 2, picomolar or less and 1 picomolar or less in the environment of said cell.

39. The isolated dsNA of claim 1, wherein said isolated dsNA is sufficiently complementary to the target EGFR mRNA sequence to reduce EGFR target mRNA expression by an amount (expressed by %) selected from the group consisting of at least 10%, at least 50%, at least 80-90%, at least 95%, at least 98%, and at least 99% when said double stranded nucleic acid is introduced into a mammalian cell.

40. The isolated dsNA of claim 5, wherein the first and second strands are joined by a chemical linker.

41. The isolated double stranded nucleic acid of claim 5, wherein said 3′ terminus of said first strand and said 5′ terminus of said second strand are joined by a chemical linker.

42. The isolated double stranded nucleic acid of claim 5, wherein a nucleotide of said second or first strand is substituted with a modified nucleotide that directs the orientation of Dicer cleavage.

43. The isolated nucleic acid of any of the preceding claim 1 comprising a modified nucleotide selected from the group consisting of a deoxyribonucleotide, a dideoxyribonucleotide, an acyclonucleotide, a 3′-deoxyadenosine (cordycepin), a 3′-azido-3′-deoxythymidine (AZT), a 2′,3′-dideoxyinosine (ddI), a 2′,3′-dideoxy-3′-thiacytidine (3TC), a 2′,3′-didehydro-2′,3′-dideoxythymidine (d4T), a monophosphate nucleotide of 3′-azido-3′-deoxythymidine (AZT), a 2′,3′-dideoxy-3′-thiacytidine (3TC) and a monophosphate nucleotide of 2′,3′-didehydro-2′,3′-dideoxythymidine (d4T), a 4-thiouracil, a 5-bromouracil, a 5-iodouracil, a 5-(3-aminoallyl)-uracil, a 2′-O-alkyl ribonucleotide, a 2′-O-methyl ribonucleotide, a 2′-amino ribonucleotide, a 2′-fluoro ribonucleotide, and a locked nucleic acid.

44. The isolated nucleic acid of claim 1 comprising a phosphate backbone modification selected from the group consisting of a phosphonate, a phosphorothioate and a phosphotriester.

45. The isolated nucleic acid of claim 1 comprising a modification selected from the group consisting of a morpholino nucleic acid and a peptide nucleic acid (PNA).

46. The isolated double stranded nucleic acid of claim 1, wherein said second oligonucleotide strand is sufficiently complementary to a target EGFR cDNA sequence selected from the group consisting of the sequences shown in Table 13 along at least 19 nucleotides of said second oligonucleotide strand length to reduce EGFR target gene expression when said double stranded nucleic acid is introduced into a mammalian cell.

47-50. (canceled)

51. A method for reducing expression of a target EGFR gene in a mammalian cell comprising contacting a mammalian cell in vitro with an isolated dsNA of claim 1 in an amount sufficient to reduce expression of a target EGFR gene in said cell.

52. The method of claim 51, wherein target EGFR gene expression is reduced by an amount (expressed by %) selected from the group consisting of at least 10%, at least 50% and at least 80-90%.

53. The method of claim 51, wherein EGFR mRNA levels are reduced by an amount (expressed by %) of at least 90% at least 8 days after said cell is contacted with said dsNA.

54. The method of claim 51, wherein EGFR mRNA levels are reduced by an amount (expressed by %) of at least 70% at least 10 days after said cell is contacted with said dsNA.

55. A method for reducing expression of a target EGFR gene in a mammal comprising administering an isolated dsNA of claim 1 to a mammal in an amount sufficient to reduce expression of a target EGFR gene in the mammal.

56. The method of claim 55, wherein said isolated dsNA is administered at a dosage selected from the group consisting of 1 microgram to 5 milligrams per kilogram of said mammal per day, 100 micrograms to 0.5 milligrams per kilogram, 0.001 to 0.25 milligrams per kilogram, 0.01 to 20 micrograms per kilogram, 0.01 to 10 micrograms per kilogram, 0.10 to 5 micrograms per kilogram, and 0.1 to 2.5 micrograms per kilogram.

57. The method of claim 55, wherein said isolated dsNA possesses greater potency than an isolated 21mer siRNA directed to the identical at least 15 nucleotides of said target EGFR mDNA in reducing target EGFR gene expression when assayed in vitro in a mammalian cell at an effective concentration in the environment of a cell of 1 nanomolar or less.

58. The method of claim 55, wherein said administering step comprises a mode selected from the group consisting of intravenous injection, intramuscular injection, intraperitoneal injection, infusion, subcutaneous injection, transdermal, aerosol, rectal, vaginal, topical, oral and inhaled delivery.

59. A method for selectively inhibiting the growth of a cell comprising contacting a cell with an amount of an isolated dsNA of claim 1 sufficient to inhibit the growth of the cell.

60. The method of claim 59, wherein said cell is a tumor cell of a subject.

61. The method of claim 59, wherein said cell is a non-small cell lung cancer cell.

62. The method of claim 61, wherein said non-small cell lung cancer cell is erlotinib resistant.

63. The method of claim 61, wherein said non-small cell lung cancer cell does not comprise a KRAS mutation.

64. The method of claim 59, wherein the growth of said cell is inhibited by an amount selected from the group consisting of at least 15%, at least 25%, at least 40% and at least 50%, as compared to an appropriate control.

65. The method of claim 59, wherein said cell is a tumor cell in vitro.

66. The method of claim 59, wherein said cell is a human cell.

67. A method for treating or preventing an EGFR-associated disease or disorder in a subject comprising administering the isolated dsNA of claim 1 and a pharmaceutically acceptable carrier to the subject in an amount sufficient to treat or prevent said EGFR-associated disease or disorder in said subject, thereby treating or preventing said EGFR-associated disease or disorder in said subject.

68. The method of claim 67, wherein said EGFR-associated disease or disorder is selected from the group consisting of squamous cell carcinoma of the head and neck (SCCHN), lung and colorectal cancer.

69. A formulation comprising the isolated dsNA of claim 1, wherein said dsNA is present in an amount effective to reduce target EGFR RNA levels when said dsNA is introduced into a mammalian cell in vitro by an amount (expressed by %) selected from the group consisting of at least 10%, at least 50% and at least 80-90%, and wherein said dsNA possesses greater potency than an isolated 21mer siRNA directed to the identical at least 15 nucleotides of said target EGFR cDNA in reducing target EGFR RNA levels when assayed in vitro in a mammalian cell at an effective concentration in the environment of a cell of 1 nanomolar or less.

70. The formulation of claim 69, wherein said effective amount is selected from the group consisting of 1 nanomolar or less, 200 picomolar or less, 100 picomolar or less, 50 picomolar or less, 20 picomolar or less, 10 picomolar or less, 5 picomolar or less, 2, picomolar or less and 1 picomolar or less in the environment of said cell.

71. A formulation comprising the isolated dsNA of claim 1, wherein said dsNA is present in an amount effective to reduce target EGFR RNA levels when said dsNA is introduced into a cell of a mammalian subject by an amount (expressed by %) selected from the group consisting of at least 10%, at least 50% and at least 80-90%, and wherein said dsNA possesses greater potency than an isolated 21mer siRNA directed to the identical at least 15 nucleotides of said target EGFR cDNA in reducing target EGFR RNA levels when assayed in vitro in a mammalian cell at an effective concentration in the environment of a cell of 1 nanomolar or less.

72. The formulation of claim 71, wherein said effective amount is a dosage selected from the group consisting of 1 microgram to 5 milligrams per kilogram of said subject per day, 100 micrograms to 0.5 milligrams per kilogram, 0.001 to 0.25 milligrams per kilogram, 0.01 to 20 micrograms per kilogram, 0.01 to 10 micrograms per kilogram, 0.10 to 5 micrograms per kilogram, and 0.1 to 2.5 micrograms per kilogram.

73. A mammalian cell containing the isolated dsNA of claim 1.

74. A pharmaceutical composition comprising the isolated dsNA of claim 1 and a pharmaceutically acceptable carrier.

75. A kit comprising the isolated dsNA of claim 1 and instructions for its use.

76. A composition possessing EGFR inhibitory activity consisting essentially of an isolated dsNA of claim 1.

The application's sequence listing, which the Patent Office published only in electronic form, follows.

SEQUENCE LISTING (3548 sequences)

SEQ ID NO: 1 - DNA, 25 bp, Artificial Sequence
  Synthetic oligonucleotide
cgcagcgcggccgcagcagccuccg

SEQ ID NO: 2 - DNA, 25 bp, Artificial Sequence
  Synthetic oligonucleotide
gcagcgcggccgcagcagccuccgc

SEQ ID NO: 3 - DNA, 25 bp, Artificial Sequence
  Synthetic oligonucleotide
agcgcggccgcagcagccuccgccc

SEQ ID NO: 4 - DNA, 25 bp, Artificial Sequence
  Synthetic oligonucleotide
gcgcuccuggcgcugcuggcugcgc

SEQ ID NO: 5 - DNA, 25 bp, Artificial Sequence
  Synthetic oligonucleotide
gcuccuggcgcugcuggcugcgctc

SEQ ID NO: 6 - DNA, 25 bp, Artificial Sequence
  Synthetic oligonucleotide
uccuggcgcugcuggcugcgcuctg

SEQ ID NO: 7 - DNA, 25 bp, Artificial Sequence
  Synthetic oligonucleotide
guugggcacuuuugaagaucauutt

SEQ ID NO: 8 - DNA, 25 bp, Artificial Sequence
  Synthetic oligonucleotide
ggaauuuggaaauuaccuaugugca

SEQ ID NO: 9 - DNA, 25 bp, Artificial Sequence
  Synthetic oligonucleotide
uuaugaucuuuccuucuuaaagacc

SEQ ID NO: 10 - DNA, 25 bp, Artificial Sequence
  Synthetic oligonucleotide
ggcugguuauguccucauugccctc

SEQ ID NO: 11 - DNA, 25 bp, Artificial Sequence
  Synthetic oligonucleotide
cccaugagaaauuuacaggaaaucc

SEQ ID NO: 12 - DNA, 25 bp, Artificial Sequence
  Synthetic oligonucleotide
ugcauggcgccgugcgguucagcaa

SEQ ID NO: 13 - DNA, 25 bp, Artificial Sequence
  Synthetic oligonucleotide
gcgccgugcgguucagcaacaaccc

SEQ ID NO: 14 - DNA, 25 bp, Artificial Sequence
  Synthetic oligonucleotide
gcgccgugcgguucagcaacaaccc

SEQ ID NO: 15 - DNA, 25 bp, Artificial Sequence
  Synthetic oligonucleotide
gccgugcgguucagcaacaaccctg

SEQ ID NO: 16 - DNA, 25 bp, Artificial Sequence
  Synthetic oligonucleotide
ccgugcgguucagcaacaacccugc

SEQ ID NO: 17 - DNA, 25 bp, Artificial Sequence
  Synthetic oligonucleotide
gcugccaaaagugugauccaagctg

SEQ ID NO: 18 - DNA, 25 bp, Artificial Sequence
  Synthetic oligonucleotide
cugugcccagcagugcuccgggcgc

SEQ ID NO: 19 - DNA, 25 bp, Artificial Sequence
  Synthetic oligonucleotide
gugcccagcagugcuccgggcgctg

SEQ ID NO: 20 - DNA, 25 bp, Artificial Sequence
  Synthetic oligonucleotide
gcuccgggcgcugccguggcaagtc

SEQ ID NO: 21 - DNA, 25 bp, Artificial Sequence
  Synthetic oligonucleotide
gagcgacugccuggucugccgcaaa

SEQ ID NO: 22 - DNA, 25 bp, Artificial Sequence
  Synthetic oligonucleotide
gccuggucugccgcaaauuccgaga

SEQ ID NO: 23 - DNA, 25 bp, Artificial Sequence
  Synthetic oligonucleotide
cagaucacggcucgugcguccgagc

SEQ ID NO: 24 - DNA, 25 bp, Artificial Sequence
  Synthetic oligonucleotide
gcaaaguguguaacggaauagguat

SEQ ID NO: 25 - DNA, 25 bp, Artificial Sequence
  Synthetic oligonucleotide
gaauagguauuggugaauuuaaaga

SEQ ID NO: 26 - DNA, 25 bp, Artificial Sequence
  Synthetic oligonucleotide
acgaauauuaaacacuucaaaaact

SEQ ID NO: 27 - DNA, 25 bp, Artificial Sequence
  Synthetic oligonucleotide
acaggaacuggauauucugaaaacc

SEQ ID NO: 28 - DNA, 25 bp, Artificial Sequence
  Synthetic oligonucleotide
caggguuuuugcugauucaggcutg

SEQ ID NO: 29 - DNA, 25 bp, Artificial Sequence
  Synthetic oligonucleotide
caggaaacaaaaauuugugcuaugc

SEQ ID NO: 30 - DNA, 25 bp, Artificial Sequence
  Synthetic oligonucleotide
gcuaugcaaauacaauaaacuggaa

SEQ ID NO: 31 - DNA, 25 bp, Artificial Sequence
  Synthetic oligonucleotide
ggucagaaaaccaaaauuauaagca

SEQ ID NO: 32 - DNA, 25 bp, Artificial Sequence
  Synthetic oligonucleotide
gcgucucuugccggaaugucagccg

SEQ ID NO: 33 - DNA, 25 bp, Artificial Sequence
  Synthetic oligonucleotide
gcccuccucuugcugcugguggugg

SEQ ID NO: 34 - DNA, 25 bp, Artificial Sequence
  Synthetic oligonucleotide
cccuccucuugcugcuggugguggc

SEQ ID NO: 35 - DNA, 25 bp, Artificial Sequence
  Synthetic oligonucleotide
ccucuugcugcuggugguggccctg

SEQ ID NO: 36 - DNA, 25 bp, Artificial Sequence
  Synthetic oligonucleotide
cucuugcugcuggugguggcccugg

SEQ ID NO: 37 - DNA, 25 bp, Artificial Sequence
  Synthetic oligonucleotide
gaagcgcacgcugcggaggcugctg

SEQ ID NO: 38 - DNA, 25 bp, Artificial Sequence
  Synthetic oligonucleotide
gcgcacgcugcggaggcugcugcag

SEQ ID NO: 39 - DNA, 25 bp, Artificial Sequence
  Synthetic oligonucleotide
cugaauucaaaaagaucaaagugct

SEQ ID NO: 40 - DNA, 25 bp, Artificial Sequence
  Synthetic oligonucleotide
aagugcugggcuccggugcguucgg

SEQ ID NO: 41 - DNA, 25 bp, Artificial Sequence
  Synthetic oligonucleotide
gugcugggcuccggugcguucggca

SEQ ID NO: 42 - DNA, 25 bp, Artificial Sequence
  Synthetic oligonucleotide
ugcugggcuccggugcguucggcac

SEQ ID NO: 43 - DNA, 25 bp, Artificial Sequence
  Synthetic oligonucleotide
gcugggcuccggugcguucggcacg

SEQ ID NO: 44 - DNA, 25 bp, Artificial Sequence
  Synthetic oligonucleotide
cugggcuccggugcguucggcacgg

SEQ ID NO: 45 - DNA, 25 bp, Artificial Sequence
  Synthetic oligonucleotide
ugugccgccugcugggcaucugcct

SEQ ID NO: 46 - DNA, 25 bp, Artificial Sequence
  Synthetic oligonucleotide
gugccgccugcugggcaucugcctc

SEQ ID NO: 47 - DNA, 25 bp, Artificial Sequence
  Synthetic oligonucleotide
gccgccugcugggcaucugccucac

SEQ ID NO: 48 - DNA, 25 bp, Artificial Sequence
  Synthetic oligonucleotide
ccgugcagcucaucacgcagcucat

SEQ ID NO: 49 - DNA, 25 bp, Artificial Sequence
  Synthetic oligonucleotide
ugcagcucaucacgcagcucaugcc

SEQ ID NO: 50 - DNA, 25 bp, Artificial Sequence
  Synthetic oligonucleotide
gcucaucacgcagcucaugcccutc

SEQ ID NO: 51 - DNA, 25 bp, Artificial Sequence
  Synthetic oligonucleotide
cucaucacgcagcucaugcccuucg

SEQ ID NO: 52 - DNA, 25 bp, Artificial Sequence
  Synthetic oligonucleotide
gcucaugcccuucggcugccucctg

SEQ ID NO: 53 - DNA, 25 bp, Artificial Sequence
  Synthetic oligonucleotide
cucaugcccuucggcugccuccugg

SEQ ID NO: 54 - DNA, 25 bp, Artificial Sequence
  Synthetic oligonucleotide
ggaggaccgucgcuuggugcaccgc

SEQ ID NO: 55 - DNA, 25 bp, Artificial Sequence
  Synthetic oligonucleotide
aggaccgucgcuuggugcaccgcga

SEQ ID NO: 56 - DNA, 25 bp, Artificial Sequence
  Synthetic oligonucleotide
ggaccgucgcuuggugcaccgcgac

SEQ ID NO: 57 - DNA, 25 bp, Artificial Sequence
  Synthetic oligonucleotide
gaccgucgcuuggugcaccgcgacc

SEQ ID NO: 58 - DNA, 25 bp, Artificial Sequence
  Synthetic oligonucleotide
ccgucgcuuggugcaccgcgacctg

SEQ ID NO: 59 - DNA, 25 bp, Artificial Sequence
  Synthetic oligonucleotide
gucgcuuggugcaccgcgaccuggc

SEQ ID NO: 60 - DNA, 25 bp, Artificial Sequence
  Synthetic oligonucleotide
cgcuuggugcaccgcgaccuggcag

SEQ ID NO: 61 - DNA, 25 bp, Artificial Sequence
  Synthetic oligonucleotide
gcuuggugcaccgcgaccuggcagc

SEQ ID NO: 62 - DNA, 25 bp, Artificial Sequence
  Synthetic oligonucleotide
uuggugcaccgcgaccuggcagcca

SEQ ID NO: 63 - DNA, 25 bp, Artificial Sequence
  Synthetic oligonucleotide
cauuggaaucaauuuuacacagaat

SEQ ID NO: 64 - DNA, 25 bp, Artificial Sequence
  Synthetic oligonucleotide
aagugcuggaugauagacgcagata

SEQ ID NO: 65 - DNA, 25 bp, Artificial Sequence
  Synthetic oligonucleotide
gugcuggaugauagacgcagauagt

SEQ ID NO: 66 - DNA, 25 bp, Artificial Sequence
  Synthetic oligonucleotide
ugcuggaugauagacgcagauagtc

SEQ ID NO: 67 - DNA, 25 bp, Artificial Sequence
  Synthetic oligonucleotide
cuggaugauagacgcagauagucgc

SEQ ID NO: 68 - DNA, 25 bp, Artificial Sequence
  Synthetic oligonucleotide
ccugagcucucugagugcaaccagc

SEQ ID NO: 69 - DNA, 25 bp, Artificial Sequence
  Synthetic oligonucleotide
gagcucucugagugcaaccagcaac

SEQ ID NO: 70 - DNA, 25 bp, Artificial Sequence
  Synthetic oligonucleotide
gcugucccaucaaggaagacagctt

SEQ ID NO: 71 - DNA, 25 bp, Artificial Sequence
  Synthetic oligonucleotide
cugucccaucaaggaagacagcutc

SEQ ID NO: 72 - DNA, 25 bp, Artificial Sequence
  Synthetic oligonucleotide
gacagcuucuugcagcgauacagct

SEQ ID NO: 73 - DNA, 25 bp, Artificial Sequence
  Synthetic oligonucleotide
acagcuucuugcagcgauacagctc

SEQ ID NO: 74 - DNA, 25 bp, Artificial Sequence
  Synthetic oligonucleotide
cagcuucuugcagcgauacagcuca

SEQ ID NO: 75 - DNA, 25 bp, Artificial Sequence
  Synthetic oligonucleotide
agcuucuugcagcgauacagcucag

SEQ ID NO: 76 - DNA, 25 bp, Artificial Sequence
  Synthetic oligonucleotide
gcuucuugcagcgauacagcucaga

SEQ ID NO: 77 - DNA, 25 bp, Artificial Sequence
  Synthetic oligonucleotide
uucuugcagcgauacagcucagacc

SEQ ID NO: 78 - DNA, 25 bp, Artificial Sequence
  Synthetic oligonucleotide
acaaagcagugaauuuauuggagca

SEQ ID NO: 79 - DNA, 25 bp, Artificial Sequence
  Synthetic oligonucleotide
auauuugaaaaaaaaaaaaaguata

SEQ ID NO: 80 - DNA, 25 bp, Artificial Sequence
  Synthetic oligonucleotide
ugaggauuuuuauugauuggggatc

SEQ ID NO: 81 - DNA, 25 bp, Artificial Sequence
  Synthetic oligonucleotide
cuauugauuuuuacuucaaugggct

SEQ ID NO: 82 - DNA, 25 bp, Artificial Sequence
  Synthetic oligonucleotide
ggaagaagcuugcugguagcacutg

SEQ ID NO: 83 - DNA, 25 bp, Artificial Sequence
  Synthetic oligonucleotide
gaagaagcuugcugguagcacuugc

SEQ ID NO: 84 - DNA, 25 bp, Artificial Sequence
  Synthetic oligonucleotide
aagaagcuugcugguagcacuugct

SEQ ID NO: 85 - DNA, 25 bp, Artificial Sequence
  Synthetic oligonucleotide
agaagcuugcugguagcacuugcta

SEQ ID NO: 86 - DNA, 25 bp, Artificial Sequence
  Synthetic oligonucleotide
gaagcuugcugguagcacuugcuac

SEQ ID NO: 87 - DNA, 25 bp, Artificial Sequence
  Synthetic oligonucleotide
agcuugcugguagcacuugcuaccc

SEQ ID NO: 88 - DNA, 25 bp, Artificial Sequence
  Synthetic oligonucleotide
gcuugcugguagcacuugcuaccct

SEQ ID NO: 89 - DNA, 25 bp, Artificial Sequence
  Synthetic oligonucleotide
cuugcugguagcacuugcuaccctg

SEQ ID NO: 90 - DNA, 25 bp, Artificial Sequence
  Synthetic oligonucleotide
uugcugguagcacuugcuacccuga

SEQ ID NO: 91 - DNA, 25 bp, Artificial Sequence
  Synthetic oligonucleotide
ugcugguagcacuugcuacccugag

SEQ ID NO: 92 - DNA, 25 bp, Artificial Sequence
  Synthetic oligonucleotide
gcugguagcacuugcuacccugagt

SEQ ID NO: 93 - DNA, 25 bp, Artificial Sequence
  Synthetic oligonucleotide
augcuugauuccagugguucugctt

SEQ ID NO: 94 - DNA, 25 bp, Artificial Sequence
  Synthetic oligonucleotide
ugcuugauuccagugguucugcutc

SEQ ID NO: 95 - DNA, 25 bp, Artificial Sequence
  Synthetic oligonucleotide
caggccggaucgguacuguaucaag

SEQ ID NO: 96 - DNA, 25 bp, Artificial Sequence
  Synthetic oligonucleotide
cggaucgguacuguaucaagucatg

SEQ ID NO: 97 - DNA, 25 bp, Artificial Sequence
  Synthetic oligonucleotide
cuuagacuuacuuuuguaaaaaugt

SEQ ID NO: 98 - DNA, 25 bp, Artificial Sequence
  Synthetic oligonucleotide
gucuugcugucaugaaaucagcaag

SEQ ID NO: 99 - DNA, 25 bp, Artificial Sequence
  Synthetic oligonucleotide
uaaggauagcaccgcuuuuguuctc

SEQ ID NO: 100 - DNA, 25 bp, Artificial Sequence
  Synthetic oligonucleotide
aggauagcaccgcuuuuguucucgc

SEQ ID NO: 101 - DNA, 25 bp, Artificial Sequence
  Synthetic oligonucleotide
ggauagcaccgcuuuuguucucgca

SEQ ID NO: 102 - DNA, 25 bp, Artificial Sequence
  Synthetic oligonucleotide
gauagcaccgcuuuuguucucgcaa

SEQ ID NO: 103 - DNA, 25 bp, Artificial Sequence
  Synthetic oligonucleotide
auagcaccgcuuuuguucucgcaaa

SEQ ID NO: 104 - DNA, 25 bp, Artificial Sequence
  Synthetic oligonucleotide
uagcaccgcuuuuguucucgcaaaa

SEQ ID NO: 105 - DNA, 25 bp, Artificial Sequence
  Synthetic oligonucleotide
agcaccgcuuuuguucucgcaaaaa

SEQ ID NO: 106 - DNA, 25 bp, Artificial Sequence
  Synthetic oligonucleotide
gcaccgcuuuuguucucgcaaaaac

SEQ ID NO: 107 - DNA, 25 bp, Artificial Sequence
  Synthetic oligonucleotide
caccgcuuuuguucucgcaaaaacg

SEQ ID NO: 108 - DNA, 25 bp, Artificial Sequence
  Synthetic oligonucleotide
cgcuuuuguucucgcaaaaacguat

SEQ ID NO: 109 - DNA, 25 bp, Artificial Sequence
  Synthetic oligonucleotide
gcuuuuguucucgcaaaaacguatc

SEQ ID NO: 110 - DNA, 25 bp, Artificial Sequence
  Synthetic oligonucleotide
cuuuuguucucgcaaaaacguauct

SEQ ID NO: 111 - DNA, 25 bp, Artificial Sequence
  Synthetic oligonucleotide
uuuuguucucgcaaaaacguauctc

SEQ ID NO: 112 - DNA, 25 bp, Artificial Sequence
  Synthetic oligonucleotide
uucucgcaaaaacguaucuccuaat

SEQ ID NO: 113 - DNA, 25 bp, Artificial Sequence
  Synthetic oligonucleotide
aaauuaguuuguguuacuuauggaa

SEQ ID NO: 114 - DNA, 25 bp, Artificial Sequence
  Synthetic oligonucleotide
uuauggaagauaguuuucuccuutt

SEQ ID NO: 115 - DNA, 25 bp, Artificial Sequence
  Synthetic oligonucleotide
ucaaaagcuuuuuacucaaagagta

SEQ ID NO: 116 - DNA, 25 bp, Artificial Sequence
  Synthetic oligonucleotide
acuaggguuugaaauugauaaugct

SEQ ID NO: 117 - DNA, 25 bp, Artificial Sequence
  Synthetic oligonucleotide
uaaaauaauuucucuacaauuggaa

SEQ ID NO: 118 - DNA, 25 bp, Artificial Sequence
  Synthetic oligonucleotide
cagcaguccuuuguaaacagugutt

SEQ ID NO: 119 - DNA, 25 bp, Artificial Sequence
  Synthetic oligonucleotide
caauuuaucaaggaagaaauggutc

SEQ ID NO: 120 - DNA, 25 bp, Artificial Sequence
  Synthetic oligonucleotide
uacaaaauguuccuuuugcuuuuaa

SEQ ID NO: 121 - DNA, 25 bp, Artificial Sequence
  Synthetic oligonucleotide
guuccuuuugcuuuuaaaguaautt

SEQ ID NO: 122 - DNA, 25 bp, Artificial Sequence
  Synthetic oligonucleotide
uuccuuuugcuuuuaaaguaauutt

SEQ ID NO: 123 - DNA, 25 bp, Artificial Sequence
  Synthetic oligonucleotide
uugcuuuuaaaguaauuuuugactc

SEQ ID NO: 124 - DNA, 25 bp, Artificial Sequence
  Synthetic oligonucleotide
guuaagaaaguauuugauuuuugtc

SEQ ID NO: 125 - DNA, 25 bp, Artificial Sequence
  Synthetic oligonucleotide
uuggaaauuaccuaugugcagagga

SEQ ID NO: 126 - DNA, 25 bp, Artificial Sequence
  Synthetic oligonucleotide
uggaaauuaccuaugugcagaggaa

SEQ ID NO: 127 - DNA, 25 bp, Artificial Sequence
  Synthetic oligonucleotide
cuuuccuucuuaaagaccauccagg

SEQ ID NO: 128 - DNA, 25 bp, Artificial Sequence
  Synthetic oligonucleotide
uuuccuucuuaaagaccauccagga

SEQ ID NO: 129 - DNA, 25 bp, Artificial Sequence
  Synthetic oligonucleotide
uuccuucuuaaagaccauccaggag

SEQ ID NO: 130 - DNA, 25 bp, Artificial Sequence
  Synthetic oligonucleotide
uccuucuuaaagaccauccaggagg

SEQ ID NO: 131 - DNA, 25 bp, Artificial Sequence
  Synthetic oligonucleotide
ccuucuuaaagaccauccaggaggt

SEQ ID NO: 132 - DNA, 25 bp, Artificial Sequence
  Synthetic oligonucleotide
cuucuuaaagaccauccaggaggtg

SEQ ID NO: 133 - DNA, 25 bp, Artificial Sequence
  Synthetic oligonucleotide
uucuuaaagaccauccaggaggugg

SEQ ID NO: 134 - DNA, 25 bp, Artificial Sequence
  Synthetic oligonucleotide
ucuuaaagaccauccaggagguggc

SEQ ID NO: 135 - DNA, 25 bp, Artificial Sequence
  Synthetic oligonucleotide
cuuaaagaccauccaggagguggct

SEQ ID NO: 136 - DNA, 25 bp, Artificial Sequence
  Synthetic oligonucleotide
uuaaagaccauccaggagguggctg

SEQ ID NO: 137 - DNA, 25 bp, Artificial Sequence
  Synthetic oligonucleotide
uaaagaccauccaggagguggcugg

SEQ ID NO: 138 - DNA, 25 bp, Artificial Sequence
  Synthetic oligonucleotide
aaagaccauccaggagguggcuggt

SEQ ID NO: 139 - DNA, 25 bp, Artificial Sequence
  Synthetic oligonucleotide
aagaccauccaggagguggcuggtt

SEQ ID NO: 140 - DNA, 25 bp, Artificial Sequence
  Synthetic oligonucleotide
agaccauccaggagguggcugguta

SEQ ID NO: 141 - DNA, 25 bp, Artificial Sequence
  Synthetic oligonucleotide
ugugauccaagcugucccaauggga

SEQ ID NO: 142 - DNA, 25 bp, Artificial Sequence
  Synthetic oligonucleotide
gugauccaagcugucccaaugggag

SEQ ID NO: 143 - DNA, 25 bp, Artificial Sequence
  Synthetic oligonucleotide
ugauccaagcugucccaaugggagc

SEQ ID NO: 144 - DNA, 25 bp, Artificial Sequence
  Synthetic oligonucleotide
gauccaagcugucccaaugggagct

SEQ ID NO: 145 - DNA, 25 bp, Artificial Sequence
  Synthetic oligonucleotide
auccaagcugucccaaugggagctg

SEQ ID NO: 146 - DNA, 25 bp, Artificial Sequence
  Synthetic oligonucleotide
aggagaggagaacugccagaaactg

SEQ ID NO: 147 - DNA, 25 bp, Artificial Sequence
  Synthetic oligonucleotide
ggagaggagaacugccagaaacuga

SEQ ID NO: 148 - DNA, 25 bp, Artificial Sequence
  Synthetic oligonucleotide
gagaggagaacugccagaaacugac

SEQ ID NO: 149 - DNA, 25 bp, Artificial Sequence
  Synthetic oligonucleotide
agaggagaacugccagaaacugacc

SEQ ID NO: 150 - DNA, 25 bp, Artificial Sequence
  Synthetic oligonucleotide
ugaccaaaaucaucugugcccagca

SEQ ID NO: 151 - DNA, 25 bp, Artificial Sequence
  Synthetic oligonucleotide
gaccaaaaucaucugugcccagcag

SEQ ID NO: 152 - DNA, 25 bp, Artificial Sequence
  Synthetic oligonucleotide
accaaaaucaucugugcccagcagt

SEQ ID NO: 153 - DNA, 25 bp, Artificial Sequence
  Synthetic oligonucleotide
ccaaaaucaucugugcccagcagtg

SEQ ID NO: 154 - DNA, 25 bp, Artificial Sequence
  Synthetic oligonucleotide
caaaaucaucugugcccagcagugc

SEQ ID NO: 155 - DNA, 25 bp, Artificial Sequence
  Synthetic oligonucleotide
aaaaucaucugugcccagcagugct

SEQ ID NO: 156 - DNA, 25 bp, Artificial Sequence
  Synthetic oligonucleotide
aaaucaucugugcccagcagugctc

SEQ ID NO: 157 - DNA, 25 bp, Artificial Sequence
  Synthetic oligonucleotide
cagugacugcugccacaaccagugt

SEQ ID NO: 158 - DNA, 25 bp, Artificial Sequence
  Synthetic oligonucleotide
agugacugcugccacaaccagugtg

SEQ ID NO: 159 - DNA, 25 bp, Artificial Sequence
  Synthetic oligonucleotide
gugacugcugccacaaccagugugc

SEQ ID NO: 160 - DNA, 25 bp, Artificial Sequence
  Synthetic oligonucleotide
cacucuccauaaaugcuacgaauat

SEQ ID NO: 161 - DNA, 25 bp, Artificial Sequence
  Synthetic oligonucleotide
uuuuugcugauucaggcuuggcctg

SEQ ID NO: 162 - DNA, 25 bp, Artificial Sequence
  Synthetic oligonucleotide
uuuugcugauucaggcuuggccuga

SEQ ID NO: 163 - DNA, 25 bp, Artificial Sequence
  Synthetic oligonucleotide
uuugcugauucaggcuuggccugaa

SEQ ID NO: 164 - DNA, 25 bp, Artificial Sequence
  Synthetic oligonucleotide
uugcugauucaggcuuggccugaaa

SEQ ID NO: 165 - DNA, 25 bp, Artificial Sequence
  Synthetic oligonucleotide
ugcugauucaggcuuggccugaaaa

SEQ ID NO: 166 - DNA, 25 bp, Artificial Sequence
  Synthetic oligonucleotide
gcugauucaggcuuggccugaaaac

SEQ ID NO: 167 - DNA, 25 bp, Artificial Sequence
  Synthetic oligonucleotide
cugauucaggcuuggccugaaaaca

SEQ ID NO: 168 - DNA, 25 bp, Artificial Sequence
  Synthetic oligonucleotide
ugauucaggcuuggccugaaaacag

SEQ ID NO: 169 - DNA, 25 bp, Artificial Sequence
  Synthetic oligonucleotide
aagcaacauggucaguuuucucutg

SEQ ID NO: 170 - DNA, 25 bp, Artificial Sequence
  Synthetic oligonucleotide
agcaacauggucaguuuucucuugc

SEQ ID NO: 171 - DNA, 25 bp, Artificial Sequence
  Synthetic oligonucleotide
gcaacauggucaguuuucucuugca

SEQ ID NO: 172 - DNA, 25 bp, Artificial Sequence
  Synthetic oligonucleotide
caauaaacuggaaaaaacuguuugg

SEQ ID NO: 173 - DNA, 25 bp, Artificial Sequence
  Synthetic oligonucleotide
caggccaugaacaucaccugcacag

SEQ ID NO: 174 - DNA, 25 bp, Artificial Sequence
  Synthetic oligonucleotide
aggccaugaacaucaccugcacagg

SEQ ID NO: 175 - DNA, 25 bp, Artificial Sequence
  Synthetic oligonucleotide
auccagugugcccacuacauugacg

SEQ ID NO: 176 - DNA, 25 bp, Artificial Sequence
  Synthetic oligonucleotide
uccagugugcccacuacauugacgg

SEQ ID NO: 177 - DNA, 25 bp, Artificial Sequence
  Synthetic oligonucleotide
ccagugugcccacuacauugacggc

SEQ ID NO: 178 - DNA, 25 bp, Artificial Sequence
  Synthetic oligonucleotide
cagugugcccacuacauugacggcc

SEQ ID NO: 179 - DNA, 25 bp, Artificial Sequence
  Synthetic oligonucleotide
agugugcccacuacauugacggccc

SEQ ID NO: 180 - DNA, 25 bp, Artificial Sequence
  Synthetic oligonucleotide
gaauucaaaaagaucaaagugcugg

SEQ ID NO: 181 - DNA, 25 bp, Artificial Sequence
  Synthetic oligonucleotide
aauucaaaaagaucaaagugcuggg

SEQ ID NO: 182 - DNA, 25 bp, Artificial Sequence
  Synthetic oligonucleotide
cucuggaucccagaaggugagaaag

SEQ ID NO: 183 - DNA, 25 bp, Artificial Sequence
  Synthetic oligonucleotide
ucuggaucccagaaggugagaaagt

SEQ ID NO: 184 - DNA, 25 bp, Artificial Sequence
  Synthetic oligonucleotide
cuggaucccagaaggugagaaagtt

SEQ ID NO: 185 - DNA, 25 bp, Artificial Sequence
  Synthetic oligonucleotide
uggaucccagaaggugagaaaguta

SEQ ID NO: 186 - DNA, 25 bp, Artificial Sequence
  Synthetic oligonucleotide
ggaucccagaaggugagaaaguuaa

SEQ ID NO: 187 - DNA, 25 bp, Artificial Sequence
  Synthetic oligonucleotide
gaucccagaaggugagaaaguuaaa

SEQ ID NO: 188 - DNA, 25 bp, Artificial Sequence
  Synthetic oligonucleotide
aucccagaaggugagaaaguuaaaa

SEQ ID NO: 189 - DNA, 25 bp, Artificial Sequence
  Synthetic oligonucleotide
ucccagaaggugagaaaguuaaaat

SEQ ID NO: 190 - DNA, 25 bp, Artificial Sequence
  Synthetic oligonucleotide
cagcaugucaagaucacagauuutg

SEQ ID NO: 191 - DNA, 25 bp, Artificial Sequence
  Synthetic oligonucleotide
agcaugucaagaucacagauuuugg

SEQ ID NO: 192 - DNA, 25 bp, Artificial Sequence
  Synthetic oligonucleotide
gcaugucaagaucacagauuuuggg

SEQ ID NO: 193 - DNA, 25 bp, Artificial Sequence
  Synthetic oligonucleotide
caugucaagaucacagauuuugggc

SEQ ID NO: 194 - DNA, 25 bp, Artificial Sequence
  Synthetic oligonucleotide
augucaagaucacagauuuugggct

SEQ ID NO: 195 - DNA, 25 bp, Artificial Sequence
  Synthetic oligonucleotide
ugucaagaucacagauuuugggctg

SEQ ID NO: 196 - DNA, 25 bp, Artificial Sequence
  Synthetic oligonucleotide
gucaagaucacagauuuugggcugg

SEQ ID NO: 197 - DNA, 25 bp, Artificial Sequence
  Synthetic oligonucleotide
ucaagaucacagauuuugggcuggc

SEQ ID NO: 198 - DNA, 25 bp, Artificial Sequence
  Synthetic oligonucleotide
caagaucacagauuuugggcuggcc

SEQ ID NO: 199 - DNA, 25 bp, Artificial Sequence
  Synthetic oligonucleotide
aagaucacagauuuugggcuggcca

SEQ ID NO: 200 - DNA, 25 bp, Artificial Sequence
  Synthetic oligonucleotide
agaucacagauuuugggcuggccaa

SEQ ID NO: 201 - DNA, 25 bp, Artificial Sequence
  Synthetic oligonucleotide
gaucacagauuuugggcuggccaaa

SEQ ID NO: 202 - DNA, 25 bp, Artificial Sequence
  Synthetic oligonucleotide
aucacagauuuugggcuggccaaac

SEQ ID NO: 203 - DNA, 25 bp, Artificial Sequence
  Synthetic oligonucleotide
ucacagauuuugggcuggccaaact

SEQ ID NO: 204 - DNA, 25 bp, Artificial Sequence
  Synthetic oligonucleotide
cacagauuuugggcuggccaaactg

SEQ ID NO: 205 - DNA, 25 bp, Artificial Sequence
  Synthetic oligonucleotide
acagauuuugggcuggccaaacugc

SEQ ID NO: 206 - DNA, 25 bp, Artificial Sequence
  Synthetic oligonucleotide
cagauuuugggcuggccaaacugct

SEQ ID NO: 207 - DNA, 25 bp, Artificial Sequence
  Synthetic oligonucleotide
agauuuugggcuggccaaacugctg

SEQ ID NO: 208 - DNA, 25 bp, Artificial Sequence
  Synthetic oligonucleotide
gauuuugggcuggccaaacugcugg

SEQ ID NO: 209 - DNA, 25 bp, Artificial Sequence
  Synthetic oligonucleotide
auuuugggcuggccaaacugcuggg

SEQ ID NO: 210 - DNA, 25 bp, Artificial Sequence
  Synthetic oligonucleotide
uuuugggcuggccaaacugcugggt

SEQ ID NO: 211 - DNA, 25 bp, Artificial Sequence
  Synthetic oligonucleotide
uuugggcuggccaaacugcugggtg

SEQ ID NO: 212 - DNA, 25 bp, Artificial Sequence
  Synthetic oligonucleotide
uugggcuggccaaacugcugggugc

SEQ ID NO: 213 - DNA, 25 bp, Artificial Sequence
  Synthetic oligonucleotide
gcaaagugccuaucaaguggauggc

SEQ ID NO: 214 - DNA, 25 bp, Artificial Sequence
  Synthetic oligonucleotide
caaagugccuaucaaguggauggca

SEQ ID NO: 215 - DNA, 25 bp, Artificial Sequence
  Synthetic oligonucleotide
aaagugccuaucaaguggauggcat

SEQ ID NO: 216 - DNA, 25 bp, Artificial Sequence
  Synthetic oligonucleotide
aagugccuaucaaguggauggcatt

SEQ ID NO: 217 - DNA, 25 bp, Artificial Sequence
  Synthetic oligonucleotide
agugccuaucaaguggauggcautg

SEQ ID NO: 218 - DNA, 25 bp, Artificial Sequence
  Synthetic oligonucleotide
gugccuaucaaguggauggcauugg

SEQ ID NO: 219 - DNA, 25 bp, Artificial Sequence
  Synthetic oligonucleotide
ugccuaucaaguggauggcauugga

SEQ ID NO: 220 - DNA, 25 bp, Artificial Sequence
  Synthetic oligonucleotide
accaucgaugucuacaugaucaugg

SEQ ID NO: 221 - DNA, 25 bp, Artificial Sequence
  Synthetic oligonucleotide
ccaucgaugucuacaugaucauggt

SEQ ID NO: 222 - DNA, 25 bp, Artificial Sequence
  Synthetic oligonucleotide
caucgaugucuacaugaucauggtc

SEQ ID NO: 223 - DNA, 25 bp, Artificial Sequence
  Synthetic oligonucleotide
aucgaugucuacaugaucaugguca

SEQ ID NO: 224 - DNA, 25 bp, Artificial Sequence
  Synthetic oligonucleotide
ucgaugucuacaugaucauggucaa

SEQ ID NO: 225 - DNA, 25 bp, Artificial Sequence
  Synthetic oligonucleotide
cgaugucuacaugaucauggucaag

SEQ ID NO: 226 - DNA, 25 bp, Artificial Sequence
  Synthetic oligonucleotide
gaugucuacaugaucauggucaagt

SEQ ID NO: 227 - DNA, 25 bp, Artificial Sequence
  Synthetic oligonucleotide
augucuacaugaucauggucaagtg

SEQ ID NO: 228 - DNA, 25 bp, Artificial Sequence
  Synthetic oligonucleotide
ugucuacaugaucauggucaagugc

SEQ ID NO: 229 - DNA, 25 bp, Artificial Sequence
  Synthetic oligonucleotide
gucuacaugaucauggucaagugct

SEQ ID NO: 230 - DNA, 25 bp, Artificial Sequence
  Synthetic oligonucleotide
ucuacaugaucauggucaagugctg

SEQ ID NO: 231 - DNA, 25 bp, Artificial Sequence
  Synthetic oligonucleotide
cuacaugaucauggucaagugcugg

SEQ ID NO: 232 - DNA, 25 bp, Artificial Sequence
  Synthetic oligonucleotide
uacaugaucauggucaagugcugga

SEQ ID NO: 233 - DNA, 25 bp, Artificial Sequence
  Synthetic oligonucleotide
acaugaucauggucaagugcuggat

SEQ ID NO: 234 - DNA, 25 bp, Artificial Sequence
  Synthetic oligonucleotide
caugaucauggucaagugcuggatg

SEQ ID NO: 235 - DNA, 25 bp, Artificial Sequence
  Synthetic oligonucleotide
augaucauggucaagugcuggauga

SEQ ID NO: 236 - DNA, 25 bp, Artificial Sequence
  Synthetic oligonucleotide
ugaucauggucaagugcuggaugat

SEQ ID NO: 237 - DNA, 25 bp, Artificial Sequence
  Synthetic oligonucleotide
gaucauggucaagugcuggaugata

SEQ ID NO: 238 - DNA, 25 bp, Artificial Sequence
  Synthetic oligonucleotide
aucauggucaagugcuggaugauag

SEQ ID NO: 239 - DNA, 25 bp, Artificial Sequence
  Synthetic oligonucleotide
ucauggucaagugcuggaugauaga

SEQ ID NO: 240 - DNA, 25 bp, Artificial Sequence
  Synthetic oligonucleotide
cauggucaagugcuggaugauagac

SEQ ID NO: 241 - DNA, 25 bp, Artificial Sequence
  Synthetic oligonucleotide
auggucaagugcuggaugauagacg

SEQ ID NO: 242 - DNA, 25 bp, Artificial Sequence
  Synthetic oligonucleotide
uggucaagugcuggaugauagacgc

SEQ ID NO: 243 - DNA, 25 bp, Artificial Sequence
  Synthetic oligonucleotide
ggucaagugcuggaugauagacgca

SEQ ID NO: 244 - DNA, 25 bp, Artificial Sequence
  Synthetic oligonucleotide
gucaagugcuggaugauagacgcag

SEQ ID NO: 245 - DNA, 25 bp, Artificial Sequence
  Synthetic oligonucleotide
ucaagugcuggaugauagacgcaga

SEQ ID NO: 246 - DNA, 25 bp, Artificial Sequence
  Synthetic oligonucleotide
gaauucuccaaaauggcccgagacc

SEQ ID NO: 247 - DNA, 25 bp, Artificial Sequence
  Synthetic oligonucleotide
aauucuccaaaauggcccgagaccc

SEQ ID NO: 248 - DNA, 25 bp, Artificial Sequence
  Synthetic oligonucleotide
gaugaaagaaugcauuugccaagtc

SEQ ID NO: 249 - DNA, 25 bp, Artificial Sequence
  Synthetic oligonucleotide
augaaagaaugcauuugccaagucc

SEQ ID NO: 250 - DNA, 25 bp, Artificial Sequence
  Synthetic oligonucleotide
ugaaagaaugcauuugccaagucct

SEQ ID NO: 251 - DNA, 25 bp, Artificial Sequence
  Synthetic oligonucleotide
gaaagaaugcauuugccaaguccta

SEQ ID NO: 252 - DNA, 25 bp, Artificial Sequence
  Synthetic oligonucleotide
aaagaaugcauuugccaaguccuac

SEQ ID NO: 253 - DNA, 25 bp, Artificial Sequence
  Synthetic oligonucleotide
gacaacccugacuaccagcaggact

SEQ ID NO: 254 - DNA, 25 bp, Artificial Sequence
  Synthetic oligonucleotide
acaacccugacuaccagcaggactt

SEQ ID NO: 255 - DNA, 25 bp, Artificial Sequence
  Synthetic oligonucleotide
caacccugacuaccagcaggacutc

SEQ ID NO: 256 - DNA, 25 bp, Artificial Sequence
  Synthetic oligonucleotide
aacccugacuaccagcaggacuuct

SEQ ID NO: 257 - DNA, 25 bp, Artificial Sequence
  Synthetic oligonucleotide
acccugacuaccagcaggacuuctt

SEQ ID NO: 258 - DNA, 25 bp, Artificial Sequence
  Synthetic oligonucleotide
cccugacuaccagcaggacuucutt

SEQ ID NO: 259 - DNA, 25 bp, Artificial Sequence
  Synthetic oligonucleotide
ccugacuaccagcaggacuucuutc

SEQ ID NO: 260 - DNA, 25 bp, Artificial Sequence
  Synthetic oligonucleotide
cugacuaccagcaggacuucuuucc

SEQ ID NO: 261 - DNA, 25 bp, Artificial Sequence
  Synthetic oligonucleotide
gcgcaacgcgcagcagccucccucc

SEQ ID NO: 262 - DNA, 25 bp, Artificial Sequence
  Synthetic oligonucleotide
gcgcagcagccucccuccucuuctt

SEQ ID NO: 263 - DNA, 25 bp, Artificial Sequence
  Synthetic oligonucleotide
ccucccuccucuucuucccgcactg

SEQ ID NO: 264 - DNA, 25 bp, Artificial Sequence
  Synthetic oligonucleotide
cccuccucuucuucccgcacugugc

SEQ ID NO: 265 - DNA, 25 bp, Artificial Sequence
  Synthetic oligonucleotide
cuccucuucuucccgcacugugcgc

SEQ ID NO: 266 - DNA, 25 bp, Artificial Sequence
  Synthetic oligonucleotide
ccucuucuucccgcacugugcgctc

SEQ ID NO: 267 - DNA, 25 bp, Artificial Sequence
  Synthetic oligonucleotide
cuucuucccgcacugugcgcucctc

SEQ ID NO: 268 - DNA, 25 bp, Artificial Sequence
  Synthetic oligonucleotide
ucuucccgcacugugcgcuccucct

SEQ ID NO: 269 - DNA, 25 bp, Artificial Sequence
  Synthetic oligonucleotide
cuucccgcacugugcgcuccucctg

SEQ ID NO: 270 - DNA, 25 bp, Artificial Sequence
  Synthetic oligonucleotide
uucccgcacugugcgcuccuccugg

SEQ ID NO: 271 - DNA, 25 bp, Artificial Sequence
  Synthetic oligonucleotide
gugcgcuccuccugggcuagggcgt

SEQ ID NO: 272 - DNA, 25 bp, Artificial Sequence
  Synthetic oligonucleotide
cgcuccuccugggcuagggcguctg

SEQ ID NO: 273 - DNA, 25 bp, Artificial Sequence
  Synthetic oligonucleotide
cacugcugguguugcugaccgcgct

SEQ ID NO: 274 - DNA, 25 bp, Artificial Sequence
  Synthetic oligonucleotide
acugcugguguugcugaccgcgctc

SEQ ID NO: 275 - DNA, 25 bp, Artificial Sequence
  Synthetic oligonucleotide
cugcugguguugcugaccgcgcuct

SEQ ID NO: 276 - DNA, 25 bp, Artificial Sequence
  Synthetic oligonucleotide
ugcugguguugcugaccgcgcuctg

SEQ ID NO: 277 - DNA, 25 bp, Artificial Sequence
  Synthetic oligonucleotide
gcugguguugcugaccgcgcucugc

SEQ ID NO: 278 - DNA, 25 bp, Artificial Sequence
  Synthetic oligonucleotide
cugguguugcugaccgcgcucugcg

SEQ ID NO: 279 - DNA, 25 bp, Artificial Sequence
  Synthetic oligonucleotide
ugguguugcugaccgcgcucugcgc

SEQ ID NO: 280 - DNA, 25 bp, Artificial Sequence
  Synthetic oligonucleotide
guguugcugaccgcgcucugcgccg

SEQ ID NO: 281 - DNA, 25 bp, Artificial Sequence
  Synthetic oligonucleotide
uguugcugaccgcgcucugcgccgc

SEQ ID NO: 282 - DNA, 25 bp, Artificial Sequence
  Synthetic oligonucleotide
guugcugaccgcgcucugcgccgca

SEQ ID NO: 283 - DNA, 25 bp, Artificial Sequence
  Synthetic oligonucleotide
uugcugaccgcgcucugcgccgcag

SEQ ID NO: 284 - DNA, 25 bp, Artificial Sequence
  Synthetic oligonucleotide
cugaccgcgcucugcgccgcaggtg

SEQ ID NO: 285 - DNA, 25 bp, Artificial Sequence
  Synthetic oligonucleotide
ugaccgcgcucugcgccgcaggugg

SEQ ID NO: 286 - DNA, 25 bp, Artificial Sequence
  Synthetic oligonucleotide
cugauuggugcugugcgauucagca

SEQ ID NO: 287 - DNA, 25 bp, Artificial Sequence
  Synthetic oligonucleotide
ugauuggugcugugcgauucagcaa

SEQ ID NO: 288 - DNA, 25 bp, Artificial Sequence
  Synthetic oligonucleotide
gauuggugcugugcgauucagcaac

SEQ ID NO: 289 - DNA, 25 bp, Artificial Sequence
  Synthetic oligonucleotide
uuggugcugugcgauucagcaacaa

SEQ ID NO: 290 - DNA, 25 bp, Artificial Sequence
  Synthetic oligonucleotide
ggugcugugcgauucagcaacaacc

SEQ ID NO: 291 - DNA, 25 bp, Artificial Sequence
  Synthetic oligonucleotide
gugcugugcgauucagcaacaaccc

SEQ ID NO: 292 - DNA, 25 bp, Artificial Sequence
  Synthetic oligonucleotide
caagcugucccaauggaagcugctg

SEQ ID NO: 293 - DNA, 25 bp, Artificial Sequence
  Synthetic oligonucleotide
gugcccagcaauguucccaucgctg

SEQ ID NO: 294 - DNA, 25 bp, Artificial Sequence
  Synthetic oligonucleotide
aaguacagcuuuggugccaccugtg

SEQ ID NO: 295 - DNA, 25 bp, Artificial Sequence
  Synthetic oligonucleotide
gucgcaaaguuuguaauggcauagg

SEQ ID NO: 296 - DNA, 25 bp, Artificial Sequence
  Synthetic oligonucleotide
gauucuuucacgcgcacuccucctc

SEQ ID NO: 297 - DNA, 25 bp, Artificial Sequence
  Synthetic oligonucleotide
caggcuuuuugcugauucaggcutg

SEQ ID NO: 298 - DNA, 25 bp, Artificial Sequence
  Synthetic oligonucleotide
caggcuuggccugauaacuggactg

SEQ ID NO: 299 - DNA, 25 bp, Artificial Sequence
  Synthetic oligonucleotide
ggcuuggccugauaacuggacugac

SEQ ID NO: 300 - DNA, 25 bp, Artificial Sequence
  Synthetic oligonucleotide
uuggccugauaacuggacugacctc

SEQ ID NO: 301 - DNA, 25 bp, Artificial Sequence
  Synthetic oligonucleotide
gccaacuguaccuauggaugugctg

SEQ ID NO: 302 - DNA, 25 bp, Artificial Sequence
  Synthetic oligonucleotide
cugggauuguggguggccuccuctt

SEQ ID NO: 303 - DNA, 25 bp, Artificial Sequence
  Synthetic oligonucleotide
ugguggcccuugggauuggccuatt

SEQ ID NO: 304 - DNA, 25 bp, Artificial Sequence
  Synthetic oligonucleotide
uuggccuauucaugcgaagacguca

SEQ ID NO: 305 - DNA, 25 bp, Artificial Sequence
  Synthetic oligonucleotide
ccgccugcuucaagagagagagctc

SEQ ID NO: 306 - DNA, 25 bp, Artificial Sequence
  Synthetic oligonucleotide
cgccugcuucaagagagagagcucg

SEQ ID NO: 307 - DNA, 25 bp, Artificial Sequence
  Synthetic oligonucleotide
gccugcuucaagagagagagcucgt

SEQ ID NO: 308 - DNA, 25 bp, Artificial Sequence
  Synthetic oligonucleotide
ggacaacccucauguaugccgcctc

SEQ ID NO: 309 - DNA, 25 bp, Artificial Sequence
  Synthetic oligonucleotide
uaugccgccuccugggcaucuguct

SEQ ID NO: 310 - DNA, 25 bp, Artificial Sequence
  Synthetic oligonucleotide
gcucaugcccuacgguugccucctg

SEQ ID NO: 311 - DNA, 25 bp, Artificial Sequence
  Synthetic oligonucleotide
cucaugcccuacgguugccuccugg

SEQ ID NO: 312 - DNA, 25 bp, Artificial Sequence
  Synthetic oligonucleotide
ucggcguuuggugcaccgugacutg

SEQ ID NO: 313 - DNA, 25 bp, Artificial Sequence
  Synthetic oligonucleotide
guuuggugcaccgugacuuggcagc

SEQ ID NO: 314 - DNA, 25 bp, Artificial Sequence
  Synthetic oligonucleotide
gggcuggccaaacugcuuggugctg

SEQ ID NO: 315 - DNA, 25 bp, Artificial Sequence
  Synthetic oligonucleotide
ggcuggccaaacugcuuggugcuga

SEQ ID NO: 316 - DNA, 25 bp, Artificial Sequence
  Synthetic oligonucleotide
cuggccaaacugcuuggugcugaag

SEQ ID NO: 317 - DNA, 25 bp, Artificial Sequence
  Synthetic oligonucleotide
uggccaaacugcuuggugcugaaga

SEQ ID NO: 318 - DNA, 25 bp, Artificial Sequence
  Synthetic oligonucleotide
caagugcuggaugauagaugcugat

SEQ ID NO: 319 - DNA, 25 bp, Artificial Sequence
  Synthetic oligonucleotide
aagugcuggaugauagaugcugata

SEQ ID NO: 320 - DNA, 25 bp, Artificial Sequence
  Synthetic oligonucleotide
agugcuggaugauagaugcugauag

SEQ ID NO: 321 - DNA, 25 bp, Artificial Sequence
  Synthetic oligonucleotide
gugcuggaugauagaugcugauagc

SEQ ID NO: 322 - DNA, 25 bp, Artificial Sequence
  Synthetic oligonucleotide
ugcuggaugauagaugcugauagcc

SEQ ID NO: 323 - DNA, 25 bp, Artificial Sequence
  Synthetic oligonucleotide
gcuggaugauagaugcugauagccg

SEQ ID NO: 324 - DNA, 25 bp, Artificial Sequence
  Synthetic oligonucleotide
cuggaugauagaugcugauagccgc

SEQ ID NO: 325 - DNA, 25 bp, Artificial Sequence
  Synthetic oligonucleotide
uggaugauagaugcugauagccgcc

SEQ ID NO: 326 - DNA, 25 bp, Artificial Sequence
  Synthetic oligonucleotide
ggaugauagaugcugauagccgccc

SEQ ID NO: 327 - DNA, 25 bp, Artificial Sequence
  Synthetic oligonucleotide
gaugauagaugcugauagccgccca

SEQ ID NO: 328 - DNA, 25 bp, Artificial Sequence
  Synthetic oligonucleotide
gauagaugcugauagccgcccaaag

SEQ ID NO: 329 - DNA, 25 bp, Artificial Sequence
  Synthetic oligonucleotide
uagaugcugauagccgcccaaagtt

SEQ ID NO: 330 - DNA, 25 bp, Artificial Sequence
  Synthetic oligonucleotide
gcugccgugucaaagaagacgcctt

SEQ ID NO: 331 - DNA, 25 bp, Artificial Sequence
  Synthetic oligonucleotide
cugccgugucaaagaagacgccutc

SEQ ID NO: 332 - DNA, 25 bp, Artificial Sequence
  Synthetic oligonucleotide
gacgccuucuugcagcgguacagct

SEQ ID NO: 333 - DNA, 25 bp, Artificial Sequence
  Synthetic oligonucleotide
acgccuucuugcagcgguacagctc

SEQ ID NO: 334 - DNA, 25 bp, Artificial Sequence
  Synthetic oligonucleotide
cgccuucuugcagcgguacagcucc

SEQ ID NO: 335 - DNA, 25 bp, Artificial Sequence
  Synthetic oligonucleotide
gccuucuugcagcgguacagcuccg

SEQ ID NO: 336 - DNA, 25 bp, Artificial Sequence
  Synthetic oligonucleotide
ccuucuugcagcgguacagcuccga

SEQ ID NO: 337 - DNA, 25 bp, Artificial Sequence
  Synthetic oligonucleotide
cuucuugcagcgguacagcuccgac

SEQ ID NO: 338 - DNA, 25 bp, Artificial Sequence
  Synthetic oligonucleotide
uucuugcagcgguacagcuccgacc

SEQ ID NO: 339 - DNA, 25 bp, Artificial Sequence
  Synthetic oligonucleotide
cuggcuuuaaagcauaacucugatg

SEQ ID NO: 340 - DNA, 25 bp, Artificial Sequence
  Synthetic oligonucleotide
gugggccucucuccugaugcacutt

SEQ ID NO: 341 - DNA, 25 bp, Artificial Sequence
  Synthetic oligonucleotide
ugggccucucuccugaugcacuutg

SEQ ID NO: 342 - DNA, 25 bp, Artificial Sequence
  Synthetic oligonucleotide
gggccucucuccugaugcacuuugg

SEQ ID NO: 343 - DNA, 25 bp, Artificial Sequence
  Synthetic oligonucleotide
ggccucucuccugaugcacuuuggg

SEQ ID NO: 344 - DNA, 25 bp, Artificial Sequence
  Synthetic oligonucleotide
cucucuccugaugcacuuugggaag

SEQ ID NO: 345 - DNA, 25 bp, Artificial Sequence
  Synthetic oligonucleotide
uugaugcacucuuguagucugguac

SEQ ID NO: 346 - DNA, 25 bp, Artificial Sequence
  Synthetic oligonucleotide
gacuuccuucuauguuuucuguutc

SEQ ID NO: 347 - DNA, 25 bp, Artificial Sequence
  Synthetic oligonucleotide
ucuauguuuucuguuucauuguutt

SEQ ID NO: 348 - DNA, 25 bp, Artificial Sequence
  Synthetic oligonucleotide
uguuuuucuuccugguaaacugcag

SEQ ID NO: 349 - DNA, 25 bp, Artificial Sequence
  Synthetic oligonucleotide
guuuuucuuccugguaaacugcagc

SEQ ID NO: 350 - DNA, 25 bp, Artificial Sequence
  Synthetic oligonucleotide
uuuuucuuccugguaaacugcagcc

SEQ ID NO: 351 - DNA, 25 bp, Artificial Sequence
  Synthetic oligonucleotide
ucuuccugguaaacugcagccaaac

SEQ ID NO: 352 - DNA, 25 bp, Artificial Sequence
  Synthetic oligonucleotide
cgaucuuccuaaugcugugaccctt

SEQ ID NO: 353 - DNA, 25 bp, Artificial Sequence
  Synthetic oligonucleotide
gaucuuccuaaugcugugacccutt

SEQ ID NO: 354 - DNA, 25 bp, Artificial Sequence
  Synthetic oligonucleotide
guugcuacuucauaacuguaaautt

SEQ ID NO: 355 - DNA, 25 bp, Artificial Sequence
  Synthetic oligonucleotide
uugcagcauccucugguuuccuaac

SEQ ID NO: 356 - DNA, 25 bp, Artificial Sequence
  Synthetic oligonucleotide
uugcaagccacucuaacuguagcaa

SEQ ID NO: 357 - RNA, 27 nt, Artificial Sequence
  Synthetic oligonucleotide
cggaggcugcugcggccgcgcugcgcc

SEQ ID NO: 358 - RNA, 27 nt, Artificial Sequence
  Synthetic oligonucleotide
gcggaggcugcugcggccgcgcugcgc

SEQ ID NO: 359 - RNA, 27 nt, Artificial Sequence
  Synthetic oligonucleotide
gggcggaggcugcugcggccgcgcugc

SEQ ID NO: 360 - RNA, 27 nt, Artificial Sequence
  Synthetic oligonucleotide
gcgcagccagcagcgccaggagcgcug

SEQ ID NO: 361 - RNA, 27 nt, Artificial Sequence
  Synthetic oligonucleotide
gagcgcagccagcagcgccaggagcgc

SEQ ID NO: 362 - RNA, 27 nt, Artificial Sequence
  Synthetic oligonucleotide
cagagcgcagccagcagcgccaggagc

SEQ ID NO: 363 - RNA, 27 nt, Artificial Sequence
  Synthetic oligonucleotide
aaaaugaucuucaaaagugcccaacug

SEQ ID NO: 364 - RNA, 27 nt, Artificial Sequence
  Synthetic oligonucleotide
ugcacauagguaauuuccaaauuccca

SEQ ID NO: 365 - RNA, 27 nt, Artificial Sequence
  Synthetic oligonucleotide
ggucuuuaagaaggaaagaucauaauu

SEQ ID NO: 366 - RNA, 27 nt, Artificial Sequence
  Synthetic oligonucleotide
gagggcaaugaggacauaaccagccac

SEQ ID NO: 367 - RNA, 27 nt, Artificial Sequence
  Synthetic oligonucleotide
ggauuuccuguaaauuucucaugggca

SEQ ID NO: 368 - RNA, 27 nt, Artificial Sequence
  Synthetic oligonucleotide
uugcugaaccgcacggcgccaugcagg

SEQ ID NO: 369 - RNA, 27 nt, Artificial Sequence
  Synthetic oligonucleotide
ggguuguugcugaaccgcacggcgcca

SEQ ID NO: 370 - RNA, 27 nt, Artificial Sequence
  Synthetic oligonucleotide
ggguuguugcugaaccgcacggcgcca

SEQ ID NO: 371 - RNA, 27 nt, Artificial Sequence
  Synthetic oligonucleotide
caggguuguugcugaaccgcacggcgc

SEQ ID NO: 372 - RNA, 27 nt, Artificial Sequence
  Synthetic oligonucleotide
gcaggguuguugcugaaccgcacggcg

SEQ ID NO: 373 - RNA, 27 nt, Artificial Sequence
  Synthetic oligonucleotide
cagcuuggaucacacuuuuggcagcug

SEQ ID NO: 374 - RNA, 27 nt, Artificial Sequence
  Synthetic oligonucleotide
gcgcccggagcacugcugggcacagau

SEQ ID NO: 375 - RNA, 27 nt, Artificial Sequence
  Synthetic oligonucleotide
cagcgcccggagcacugcugggcacag

SEQ ID NO: 376 - RNA, 27 nt, Artificial Sequence
  Synthetic oligonucleotide
gacuugccacggcagcgcccggagcac

SEQ ID NO: 377 - RNA, 27 nt, Artificial Sequence
  Synthetic oligonucleotide
uuugcggcagaccaggcagucgcucuc

SEQ ID NO: 378 - RNA, 27 nt, Artificial Sequence
  Synthetic oligonucleotide
ucucggaauuugcggcagaccaggcag

SEQ ID NO: 379 - RNA, 27 nt, Artificial Sequence
  Synthetic oligonucleotide
gcucggacgcacgagccgugaucuguc

SEQ ID NO: 380 - RNA, 27 nt, Artificial Sequence
  Synthetic oligonucleotide
auaccuauuccguuacacacuuugcgg

SEQ ID NO: 381 - RNA, 27 nt, Artificial Sequence
  Synthetic oligonucleotide
ucuuuaaauucaccaauaccuauuccg

SEQ ID NO: 382 - RNA, 27 nt, Artificial Sequence
  Synthetic oligonucleotide
aguuuuugaaguguuuaauauucguag

SEQ ID NO: 383 - RNA, 27 nt, Artificial Sequence
  Synthetic oligonucleotide
gguuuucagaauauccaguuccugugg

SEQ ID NO: 384 - RNA, 27 nt, Artificial Sequence
  Synthetic oligonucleotide
caagccugaaucagcaaaaacccugug

SEQ ID NO: 385 - RNA, 27 nt, Artificial Sequence
  Synthetic oligonucleotide
gcauagcacaaauuuuuguuuccugaa

SEQ ID NO: 386 - RNA, 27 nt, Artificial Sequence
  Synthetic oligonucleotide
uuccaguuuauuguauuugcauagcac

SEQ ID NO: 387 - RNA, 27 nt, Artificial Sequence
  Synthetic oligonucleotide
ugcuuauaauuuugguuuucugaccgg

SEQ ID NO: 388 - RNA, 27 nt, Artificial Sequence
  Synthetic oligonucleotide
cggcugacauuccggcaagagacgcag

SEQ ID NO: 389 - RNA, 27 nt, Artificial Sequence
  Synthetic oligonucleotide
ccaccaccagcagcaagaggagggccc

SEQ ID NO: 390 - RNA, 27 nt, Artificial Sequence
  Synthetic oligonucleotide
gccaccaccagcagcaagaggagggcc

SEQ ID NO: 391 - RNA, 27 nt, Artificial Sequence
  Synthetic oligonucleotide
cagggccaccaccagcagcaagaggag

SEQ ID NO: 392 - RNA, 27 nt, Artificial Sequence
  Synthetic oligonucleotide
ccagggccaccaccagcagcaagagga

SEQ ID NO: 393 - RNA, 27 nt, Artificial Sequence
  Synthetic oligonucleotide
cagcagccuccgcagcgugcgcuuccg

SEQ ID NO: 394 - RNA, 27 nt, Artificial Sequence
  Synthetic oligonucleotide
cugcagcagccuccgcagcgugcgcuu

SEQ ID NO: 395 - RNA, 27 nt, Artificial Sequence
  Synthetic oligonucleotide
agcacuuugaucuuuuugaauucaguu

SEQ ID NO: 396 - RNA, 27 nt, Artificial Sequence
  Synthetic oligonucleotide
ccgaacgcaccggagcccagcacuuug

SEQ ID NO: 397 - RNA, 27 nt, Artificial Sequence
  Synthetic oligonucleotide
ugccgaacgcaccggagcccagcacuu

SEQ ID NO: 398 - RNA, 27 nt, Artificial Sequence
  Synthetic oligonucleotide
gugccgaacgcaccggagcccagcacu

SEQ ID NO: 399 - RNA, 27 nt, Artificial Sequence
  Synthetic oligonucleotide
cgugccgaacgcaccggagcccagcac

SEQ ID NO: 400 - RNA, 27 nt, Artificial Sequence
  Synthetic oligonucleotide
ccgugccgaacgcaccggagcccagca

SEQ ID NO: 401 - RNA, 27 nt, Artificial Sequence
  Synthetic oligonucleotide
aggcagaugcccagcaggcggcacacg

SEQ ID NO: 402 - RNA, 27 nt, Artificial Sequence
  Synthetic oligonucleotide
gaggcagaugcccagcaggcggcacac

SEQ ID NO: 403 - RNA, 27 nt, Artificial Sequence
  Synthetic oligonucleotide
gugaggcagaugcccagcaggcggcac

SEQ ID NO: 404 - RNA, 27 nt, Artificial Sequence
  Synthetic oligonucleotide
augagcugcgugaugagcugcacggug

SEQ ID NO: 405 - RNA, 27 nt, Artificial Sequence
  Synthetic oligonucleotide
ggcaugagcugcgugaugagcugcacg

SEQ ID NO: 406 - RNA, 27 nt, Artificial Sequence
  Synthetic oligonucleotide
gaagggcaugagcugcgugaugagcug

SEQ ID NO: 407 - RNA, 27 nt, Artificial Sequence
  Synthetic oligonucleotide
cgaagggcaugagcugcgugaugagcu

SEQ ID NO: 408 - RNA, 27 nt, Artificial Sequence
  Synthetic oligonucleotide
caggaggcagccgaagggcaugagcug

SEQ ID NO: 409 - RNA, 27 nt, Artificial Sequence
  Synthetic oligonucleotide
ccaggaggcagccgaagggcaugagcu

SEQ ID NO: 410 - RNA, 27 nt, Artificial Sequence
  Synthetic oligonucleotide
gcggugcaccaagcgacgguccuccaa

SEQ ID NO: 411 - RNA, 27 nt, Artificial Sequence
  Synthetic oligonucleotide
ucgcggugcaccaagcgacgguccucc

SEQ ID NO: 412 - RNA, 27 nt, Artificial Sequence
  Synthetic oligonucleotide
gucgcggugcaccaagcgacgguccuc

SEQ ID NO: 413 - RNA, 27 nt, Artificial Sequence
  Synthetic oligonucleotide
ggucgcggugcaccaagcgacgguccu

SEQ ID NO: 414 - RNA, 27 nt, Artificial Sequence
  Synthetic oligonucleotide
caggucgcggugcaccaagcgacgguc

SEQ ID NO: 415 - RNA, 27 nt, Artificial Sequence
  Synthetic oligonucleotide
gccaggucgcggugcaccaagcgacgg

SEQ ID NO: 416 - RNA, 27 nt, Artificial Sequence
  Synthetic oligonucleotide
cugccaggucgcggugcaccaagcgac

SEQ ID NO: 417 - RNA, 27 nt, Artificial Sequence
  Synthetic oligonucleotide
gcugccaggucgcggugcaccaagcga

SEQ ID NO: 418 - RNA, 27 nt, Artificial Sequence
  Synthetic oligonucleotide
uggcugccaggucgcggugcaccaagc

SEQ ID NO: 419 - RNA, 27 nt, Artificial Sequence
  Synthetic oligonucleotide
auucuguguaaaauugauuccaaugcc

SEQ ID NO: 420 - RNA, 27 nt, Artificial Sequence
  Synthetic oligonucleotide
uaucugcgucuaucauccagcacuuga

SEQ ID NO: 421 - RNA, 27 nt, Artificial Sequence
  Synthetic oligonucleotide
acuaucugcgucuaucauccagcacuu

SEQ ID NO: 422 - RNA, 27 nt, Artificial Sequence
  Synthetic oligonucleotide
gacuaucugcgucuaucauccagcacu

SEQ ID NO: 423 - RNA, 27 nt, Artificial Sequence
  Synthetic oligonucleotide
gcgacuaucugcgucuaucauccagca

SEQ ID NO: 424 - RNA, 27 nt, Artificial Sequence
  Synthetic oligonucleotide
gcugguugcacucagagagcucaggag

SEQ ID NO: 425 - RNA, 27 nt, Artificial Sequence
  Synthetic oligonucleotide
guugcugguugcacucagagagcucag

SEQ ID NO: 426 - RNA, 27 nt, Artificial Sequence
  Synthetic oligonucleotide
aagcugucuuccuugaugggacagcuu

SEQ ID NO: 427 - RNA, 27 nt, Artificial Sequence
  Synthetic oligonucleotide
gaagcugucuuccuugaugggacagcu

SEQ ID NO: 428 - RNA, 27 nt, Artificial Sequence
  Synthetic oligonucleotide
agcuguaucgcugcaagaagcugucuu

SEQ ID NO: 429 - RNA, 27 nt, Artificial Sequence
  Synthetic oligonucleotide
gagcuguaucgcugcaagaagcugucu

SEQ ID NO: 430 - RNA, 27 nt, Artificial Sequence
  Synthetic oligonucleotide
ugagcuguaucgcugcaagaagcuguc

SEQ ID NO: 431 - RNA, 27 nt, Artificial Sequence
  Synthetic oligonucleotide
cugagcuguaucgcugcaagaagcugu

SEQ ID NO: 432 - RNA, 27 nt, Artificial Sequence
  Synthetic oligonucleotide
ucugagcuguaucgcugcaagaagcug

SEQ ID NO: 433 - RNA, 27 nt, Artificial Sequence
  Synthetic oligonucleotide
ggucugagcuguaucgcugcaagaagc

SEQ ID NO: 434 - RNA, 27 nt, Artificial Sequence
  Synthetic oligonucleotide
ugcuccaauaaauucacugcuuugugg

SEQ ID NO: 435 - RNA, 27 nt, Artificial Sequence
  Synthetic oligonucleotide
uauacuuuuuuuuuuuuucaaauauac

SEQ ID NO: 436 - RNA, 27 nt, Artificial Sequence
  Synthetic oligonucleotide
gauccccaaucaauaaaaauccucaca

SEQ ID NO: 437 - RNA, 27 nt, Artificial Sequence
  Synthetic oligonucleotide
agcccauugaaguaaaaaucaauagcg

SEQ ID NO: 438 - RNA, 27 nt, Artificial Sequence
  Synthetic oligonucleotide
caagugcuaccagcaagcuucuuccuu

SEQ ID NO: 439 - RNA, 27 nt, Artificial Sequence
  Synthetic oligonucleotide
gcaagugcuaccagcaagcuucuuccu

SEQ ID NO: 440 - RNA, 27 nt, Artificial Sequence
  Synthetic oligonucleotide
agcaagugcuaccagcaagcuucuucc

SEQ ID NO: 441 - RNA, 27 nt, Artificial Sequence
  Synthetic oligonucleotide
uagcaagugcuaccagcaagcuucuuc

SEQ ID NO: 442 - RNA, 27 nt, Artificial Sequence
  Synthetic oligonucleotide
guagcaagugcuaccagcaagcuucuu

SEQ ID NO: 443 - RNA, 27 nt, Artificial Sequence
  Synthetic oligonucleotide
ggguagcaagugcuaccagcaagcuuc

SEQ ID NO: 444 - RNA, 27 nt, Artificial Sequence
  Synthetic oligonucleotide
aggguagcaagugcuaccagcaagcuu

SEQ ID NO: 445 - RNA, 27 nt, Artificial Sequence
  Synthetic oligonucleotide
caggguagcaagugcuaccagcaagcu

SEQ ID NO: 446 - RNA, 27 nt, Artificial Sequence
  Synthetic oligonucleotide
ucaggguagcaagugcuaccagcaagc

SEQ ID NO: 447 - RNA, 27 nt, Artificial Sequence
  Synthetic oligonucleotide
cucaggguagcaagugcuaccagcaag

SEQ ID NO: 448 - RNA, 27 nt, Artificial Sequence
  Synthetic oligonucleotide
acucaggguagcaagugcuaccagcaa

SEQ ID NO: 449 - RNA, 27 nt, Artificial Sequence
  Synthetic oligonucleotide
aagcagaaccacuggaaucaagcaucc

SEQ ID NO: 450 - RNA, 27 nt, Artificial Sequence
  Synthetic oligonucleotide
gaagcagaaccacuggaaucaagcauc

SEQ ID NO: 451 - RNA, 27 nt, Artificial Sequence
  Synthetic oligonucleotide
cuugauacaguaccgauccggccugcu

SEQ ID NO: 452 - RNA, 27 nt, Artificial Sequence
  Synthetic oligonucleotide
caugacuugauacaguaccgauccggc

SEQ ID NO: 453 - RNA, 27 nt, Artificial Sequence
  Synthetic oligonucleotide
acauuuuuacaaaaguaagucuaagga

SEQ ID NO: 454 - RNA, 27 nt, Artificial Sequence
  Synthetic oligonucleotide
cuugcugauuucaugacagcaagacag

SEQ ID NO: 455 - RNA, 27 nt, Artificial Sequence
  Synthetic oligonucleotide
gagaacaaaagcggugcuauccuuagg

SEQ ID NO: 456 - RNA, 27 nt, Artificial Sequence
  Synthetic oligonucleotide
gcgagaacaaaagcggugcuauccuua

SEQ ID NO: 457 - RNA, 27 nt, Artificial Sequence
  Synthetic oligonucleotide
ugcgagaacaaaagcggugcuauccuu

SEQ ID NO: 458 - RNA, 27 nt, Artificial Sequence
  Synthetic oligonucleotide
uugcgagaacaaaagcggugcuauccu

SEQ ID NO: 459 - RNA, 27 nt, Artificial Sequence
  Synthetic oligonucleotide
uuugcgagaacaaaagcggugcuaucc

SEQ ID NO: 460 - RNA, 27 nt, Artificial Sequence
  Synthetic oligonucleotide
uuuugcgagaacaaaagcggugcuauc

SEQ ID NO: 461 - RNA, 27 nt, Artificial Sequence
  Synthetic oligonucleotide
uuuuugcgagaacaaaagcggugcuau

SEQ ID NO: 462 - RNA, 27 nt, Artificial Sequence
  Synthetic oligonucleotide
guuuuugcgagaacaaaagcggugcua

SEQ ID NO: 463 - RNA, 27 nt, Artificial Sequence
  Synthetic oligonucleotide
cguuuuugcgagaacaaaagcggugcu

SEQ ID NO: 464 - RNA, 27 nt, Artificial Sequence
  Synthetic oligonucleotide
auacguuuuugcgagaacaaaagcggu

SEQ ID NO: 465 - RNA, 27 nt, Artificial Sequence
  Synthetic oligonucleotide
gauacguuuuugcgagaacaaaagcgg

SEQ ID NO: 466 - RNA, 27 nt, Artificial Sequence
  Synthetic oligonucleotide
agauacguuuuugcgagaacaaaagcg

SEQ ID NO: 467 - RNA, 27 nt, Artificial Sequence
  Synthetic oligonucleotide
gagauacguuuuugcgagaacaaaagc

SEQ ID NO: 468 - RNA, 27 nt, Artificial Sequence
  Synthetic oligonucleotide
auuaggagauacguuuuugcgagaaca

SEQ ID NO: 469 - RNA, 27 nt, Artificial Sequence
  Synthetic oligonucleotide
uuccauaaguaacacaaacuaauuuug

SEQ ID NO: 470 - RNA, 27 nt, Artificial Sequence
  Synthetic oligonucleotide
aaaaggagaaaacuaucuuccauaagu

SEQ ID NO: 471 - RNA, 27 nt, Artificial Sequence
  Synthetic oligonucleotide
uacucuuugaguaaaaagcuuuugaag

SEQ ID NO: 472 - RNA, 27 nt, Artificial Sequence
  Synthetic oligonucleotide
agcauuaucaauuucaaacccuaguuu

SEQ ID NO: 473 - RNA, 27 nt, Artificial Sequence
  Synthetic oligonucleotide
uuccaauuguagagaaauuauuuuagg

SEQ ID NO: 474 - RNA, 27 nt, Artificial Sequence
  Synthetic oligonucleotide
aaacacuguuuacaaaggacugcuguu

SEQ ID NO: 475 - RNA, 27 nt, Artificial Sequence
  Synthetic oligonucleotide
gaaccauuucuuccuugauaaauugga

SEQ ID NO: 476 - RNA, 27 nt, Artificial Sequence
  Synthetic oligonucleotide
uuaaaagcaaaaggaacauuuuguaug

SEQ ID NO: 477 - RNA, 27 nt, Artificial Sequence
  Synthetic oligonucleotide
aaauuacuuuaaaagcaaaaggaacau

SEQ ID NO: 478 - RNA, 27 nt, Artificial Sequence
  Synthetic oligonucleotide
aaaauuacuuuaaaagcaaaaggaaca

SEQ ID NO: 479 - RNA, 27 nt, Artificial Sequence
  Synthetic oligonucleotide
gagucaaaaauuacuuuaaaagcaaaa

SEQ ID NO: 480 - RNA, 27 nt, Artificial Sequence
  Synthetic oligonucleotide
gacaaaaaucaaauacuuucuuaacaa

SEQ ID NO: 481 - RNA, 27 nt, Artificial Sequence
  Synthetic oligonucleotide
uccucugcacauagguaauuuccaaau

SEQ ID NO: 482 - RNA, 27 nt, Artificial Sequence
  Synthetic oligonucleotide
uuccucugcacauagguaauuuccaaa

SEQ ID NO: 483 - RNA, 27 nt, Artificial Sequence
  Synthetic oligonucleotide
ccuggauggucuuuaagaaggaaagau

SEQ ID NO: 484 - RNA, 27 nt, Artificial Sequence
  Synthetic oligonucleotide
uccuggauggucuuuaagaaggaaaga

SEQ ID NO: 485 - RNA, 27 nt, Artificial Sequence
  Synthetic oligonucleotide
cuccuggauggucuuuaagaaggaaag

SEQ ID NO: 486 - RNA, 27 nt, Artificial Sequence
  Synthetic oligonucleotide
ccuccuggauggucuuuaagaaggaaa

SEQ ID NO: 487 - RNA, 27 nt, Artificial Sequence
  Synthetic oligonucleotide
accuccuggauggucuuuaagaaggaa

SEQ ID NO: 488 - RNA, 27 nt, Artificial Sequence
  Synthetic oligonucleotide
caccuccuggauggucuuuaagaagga

SEQ ID NO: 489 - RNA, 27 nt, Artificial Sequence
  Synthetic oligonucleotide
ccaccuccuggauggucuuuaagaagg

SEQ ID NO: 490 - RNA, 27 nt, Artificial Sequence
  Synthetic oligonucleotide
gccaccuccuggauggucuuuaagaag

SEQ ID NO: 491 - RNA, 27 nt, Artificial Sequence
  Synthetic oligonucleotide
agccaccuccuggauggucuuuaagaa

SEQ ID NO: 492 - RNA, 27 nt, Artificial Sequence
  Synthetic oligonucleotide
cagccaccuccuggauggucuuuaaga

SEQ ID NO: 493 - RNA, 27 nt, Artificial Sequence
  Synthetic oligonucleotide
ccagccaccuccuggauggucuuuaag

SEQ ID NO: 494 - RNA, 27 nt, Artificial Sequence
  Synthetic oligonucleotide
accagccaccuccuggauggucuuuaa

SEQ ID NO: 495 - RNA, 27 nt, Artificial Sequence
  Synthetic oligonucleotide
aaccagccaccuccuggauggucuuua

SEQ ID NO: 496 - RNA, 27 nt, Artificial Sequence
  Synthetic oligonucleotide
uaaccagccaccuccuggauggucuuu

SEQ ID NO: 497 - RNA, 27 nt, Artificial Sequence
  Synthetic oligonucleotide
ucccauugggacagcuuggaucacacu

SEQ ID NO: 498 - RNA, 27 nt, Artificial Sequence
  Synthetic oligonucleotide
cucccauugggacagcuuggaucacac

SEQ ID NO: 499 - RNA, 27 nt, Artificial Sequence
  Synthetic oligonucleotide
gcucccauugggacagcuuggaucaca

SEQ ID NO: 500 - RNA, 27 nt, Artificial Sequence
  Synthetic oligonucleotide
agcucccauugggacagcuuggaucac

SEQ ID NO: 501 - RNA, 27 nt, Artificial Sequence
  Synthetic oligonucleotide
cagcucccauugggacagcuuggauca

SEQ ID NO: 502 - RNA, 27 nt, Artificial Sequence
  Synthetic oligonucleotide
caguuucuggcaguucuccucuccugc

SEQ ID NO: 503 - RNA, 27 nt, Artificial Sequence
  Synthetic oligonucleotide
ucaguuucuggcaguucuccucuccug

SEQ ID NO: 504 - RNA, 27 nt, Artificial Sequence
  Synthetic oligonucleotide
gucaguuucuggcaguucuccucuccu

SEQ ID NO: 505 - RNA, 27 nt, Artificial Sequence
  Synthetic oligonucleotide
ggucaguuucuggcaguucuccucucc

SEQ ID NO: 506 - RNA, 27 nt, Artificial Sequence
  Synthetic oligonucleotide
ugcugggcacagaugauuuuggucagu

SEQ ID NO: 507 - RNA, 27 nt, Artificial Sequence
  Synthetic oligonucleotide
cugcugggcacagaugauuuuggucag

SEQ ID NO: 508 - RNA, 27 nt, Artificial Sequence
  Synthetic oligonucleotide
acugcugggcacagaugauuuugguca

SEQ ID NO: 509 - RNA, 27 nt, Artificial Sequence
  Synthetic oligonucleotide
cacugcugggcacagaugauuuugguc

SEQ ID NO: 510 - RNA, 27 nt, Artificial Sequence
  Synthetic oligonucleotide
gcacugcugggcacagaugauuuuggu

SEQ ID NO: 511 - RNA, 27 nt, Artificial Sequence
  Synthetic oligonucleotide
agcacugcugggcacagaugauuuugg

SEQ ID NO: 512 - RNA, 27 nt, Artificial Sequence
  Synthetic oligonucleotide
gagcacugcugggcacagaugauuuug

SEQ ID NO: 513 - RNA, 27 nt, Artificial Sequence
  Synthetic oligonucleotide
acacugguuguggcagcagucacuggg

SEQ ID NO: 514 - RNA, 27 nt, Artificial Sequence
  Synthetic oligonucleotide
cacacugguuguggcagcagucacugg

SEQ ID NO: 515 - RNA, 27 nt, Artificial Sequence
  Synthetic oligonucleotide
gcacacugguuguggcagcagucacug

SEQ ID NO: 516 - RNA, 27 nt, Artificial Sequence
  Synthetic oligonucleotide
auauucguagcauuuauggagagugag

SEQ ID NO: 517 - RNA, 27 nt, Artificial Sequence
  Synthetic oligonucleotide
caggccaagccugaaucagcaaaaacc

SEQ ID NO: 518 - RNA, 27 nt, Artificial Sequence
  Synthetic oligonucleotide
ucaggccaagccugaaucagcaaaaac

SEQ ID NO: 519 - RNA, 27 nt, Artificial Sequence
  Synthetic oligonucleotide
uucaggccaagccugaaucagcaaaaa

SEQ ID NO: 520 - RNA, 27 nt, Artificial Sequence
  Synthetic oligonucleotide
uuucaggccaagccugaaucagcaaaa

SEQ ID NO: 521 - RNA, 27 nt, Artificial Sequence
  Synthetic oligonucleotide
uuuucaggccaagccugaaucagcaaa

SEQ ID NO: 522 - RNA, 27 nt, Artificial Sequence
  Synthetic oligonucleotide
guuuucaggccaagccugaaucagcaa

SEQ ID NO: 523 - RNA, 27 nt, Artificial Sequence
  Synthetic oligonucleotide
uguuuucaggccaagccugaaucagca

SEQ ID NO: 524 - RNA, 27 nt, Artificial Sequence
  Synthetic oligonucleotide
cuguuuucaggccaagccugaaucagc

SEQ ID NO: 525 - RNA, 27 nt, Artificial Sequence
  Synthetic oligonucleotide
caagagaaaacugaccauguugcuugg

SEQ ID NO: 526 - RNA, 27 nt, Artificial Sequence
  Synthetic oligonucleotide
gcaagagaaaacugaccauguugcuug

SEQ ID NO: 527 - RNA, 27 nt, Artificial Sequence
  Synthetic oligonucleotide
ugcaagagaaaacugaccauguugcuu

SEQ ID NO: 528 - RNA, 27 nt, Artificial Sequence
  Synthetic oligonucleotide
ccaaacaguuuuuuccaguuuauugua

SEQ ID NO: 529 - RNA, 27 nt, Artificial Sequence
  Synthetic oligonucleotide
cugugcaggugauguucauggccugag

SEQ ID NO: 530 - RNA, 27 nt, Artificial Sequence
  Synthetic oligonucleotide
ccugugcaggugauguucauggccuga

SEQ ID NO: 531 - RNA, 27 nt, Artificial Sequence
  Synthetic oligonucleotide
cgucaauguagugggcacacuggauac

SEQ ID NO: 532 - RNA, 27 nt, Artificial Sequence
  Synthetic oligonucleotide
ccgucaauguagugggcacacuggaua

SEQ ID NO: 533 - RNA, 27 nt, Artificial Sequence
  Synthetic oligonucleotide
gccgucaauguagugggcacacuggau

SEQ ID NO: 534 - RNA, 27 nt, Artificial Sequence
  Synthetic oligonucleotide
ggccgucaauguagugggcacacugga

SEQ ID NO: 535 - RNA, 27 nt, Artificial Sequence
  Synthetic oligonucleotide
gggccgucaauguagugggcacacugg

SEQ ID NO: 536 - RNA, 27 nt, Artificial Sequence
  Synthetic oligonucleotide
ccagcacuuugaucuuuuugaauucag

SEQ ID NO: 537 - RNA, 27 nt, Artificial Sequence
  Synthetic oligonucleotide
cccagcacuuugaucuuuuugaauuca

SEQ ID NO: 538 - RNA, 27 nt, Artificial Sequence
  Synthetic oligonucleotide
cuuucucaccuucugggauccagaguc

SEQ ID NO: 539 - RNA, 27 nt, Artificial Sequence
  Synthetic oligonucleotide
acuuucucaccuucugggauccagagu

SEQ ID NO: 540 - RNA, 27 nt, Artificial Sequence
  Synthetic oligonucleotide
aacuuucucaccuucugggauccagag

SEQ ID NO: 541 - RNA, 27 nt, Artificial Sequence
  Synthetic oligonucleotide
uaacuuucucaccuucugggauccaga

SEQ ID NO: 542 - RNA, 27 nt, Artificial Sequence
  Synthetic oligonucleotide
uuaacuuucucaccuucugggauccag

SEQ ID NO: 543 - RNA, 27 nt, Artificial Sequence
  Synthetic oligonucleotide
uuuaacuuucucaccuucugggaucca

SEQ ID NO: 544 - RNA, 27 nt, Artificial Sequence
  Synthetic oligonucleotide
uuuuaacuuucucaccuucugggaucc

SEQ ID NO: 545 - RNA, 27 nt, Artificial Sequence
  Synthetic oligonucleotide
auuuuaacuuucucaccuucugggauc

SEQ ID NO: 546 - RNA, 27 nt, Artificial Sequence
  Synthetic oligonucleotide
caaaaucugugaucuugacaugcugcg

SEQ ID NO: 547 - RNA, 27 nt, Artificial Sequence
  Synthetic oligonucleotide
ccaaaaucugugaucuugacaugcugc

SEQ ID NO: 548 - RNA, 27 nt, Artificial Sequence
  Synthetic oligonucleotide
cccaaaaucugugaucuugacaugcug

SEQ ID NO: 549 - RNA, 27 nt, Artificial Sequence
  Synthetic oligonucleotide
gcccaaaaucugugaucuugacaugcu

SEQ ID NO: 550 - RNA, 27 nt, Artificial Sequence
  Synthetic oligonucleotide
agcccaaaaucugugaucuugacaugc

SEQ ID NO: 551 - RNA, 27 nt, Artificial Sequence
  Synthetic oligonucleotide
cagcccaaaaucugugaucuugacaug

SEQ ID NO: 552 - RNA, 27 nt, Artificial Sequence
  Synthetic oligonucleotide
ccagcccaaaaucugugaucuugacau

SEQ ID NO: 553 - RNA, 27 nt, Artificial Sequence
  Synthetic oligonucleotide
gccagcccaaaaucugugaucuugaca

SEQ ID NO: 554 - RNA, 27 nt, Artificial Sequence
  Synthetic oligonucleotide
ggccagcccaaaaucugugaucuugac

SEQ ID NO: 555 - RNA, 27 nt, Artificial Sequence
  Synthetic oligonucleotide
uggccagcccaaaaucugugaucuuga

SEQ ID NO: 556 - RNA, 27 nt, Artificial Sequence
  Synthetic oligonucleotide
uuggccagcccaaaaucugugaucuug

SEQ ID NO: 557 - RNA, 27 nt, Artificial Sequence
  Synthetic oligonucleotide
uuuggccagcccaaaaucugugaucuu

SEQ ID NO: 558 - RNA, 27 nt, Artificial Sequence
  Synthetic oligonucleotide
guuuggccagcccaaaaucugugaucu

SEQ ID NO: 559 - RNA, 27 nt, Artificial Sequence
  Synthetic oligonucleotide
aguuuggccagcccaaaaucugugauc

SEQ ID NO: 560 - RNA, 27 nt, Artificial Sequence
  Synthetic oligonucleotide
caguuuggccagcccaaaaucugugau

SEQ ID NO: 561 - RNA, 27 nt, Artificial Sequence
  Synthetic oligonucleotide
gcaguuuggccagcccaaaaucuguga

SEQ ID NO: 562 - RNA, 27 nt, Artificial Sequence
  Synthetic oligonucleotide
agcaguuuggccagcccaaaaucugug

SEQ ID NO: 563 - RNA, 27 nt, Artificial Sequence
  Synthetic oligonucleotide
cagcaguuuggccagcccaaaaucugu

SEQ ID NO: 564 - RNA, 27 nt, Artificial Sequence
  Synthetic oligonucleotide
ccagcaguuuggccagcccaaaaucug

SEQ ID NO: 565 - RNA, 27 nt, Artificial Sequence
  Synthetic oligonucleotide
cccagcaguuuggccagcccaaaaucu

SEQ ID NO: 566 - RNA, 27 nt, Artificial Sequence
  Synthetic oligonucleotide
acccagcaguuuggccagcccaaaauc

SEQ ID NO: 567 - RNA, 27 nt, Artificial Sequence
  Synthetic oligonucleotide
cacccagcaguuuggccagcccaaaau

SEQ ID NO: 568 - RNA, 27 nt, Artificial Sequence
  Synthetic oligonucleotide
gcacccagcaguuuggccagcccaaaa

SEQ ID NO: 569 - RNA, 27 nt, Artificial Sequence
  Synthetic oligonucleotide
gccauccacuugauaggcacuuugccu

SEQ ID NO: 570 - RNA, 27 nt, Artificial Sequence
  Synthetic oligonucleotide
ugccauccacuugauaggcacuuugcc

SEQ ID NO: 571 - RNA, 27 nt, Artificial Sequence
  Synthetic oligonucleotide
augccauccacuugauaggcacuuugc

SEQ ID NO: 572 - RNA, 27 nt, Artificial Sequence
  Synthetic oligonucleotide
aaugccauccacuugauaggcacuuug

SEQ ID NO: 573 - RNA, 27 nt, Artificial Sequence
  Synthetic oligonucleotide
caaugccauccacuugauaggcacuuu

SEQ ID NO: 574 - RNA, 27 nt, Artificial Sequence
  Synthetic oligonucleotide
ccaaugccauccacuugauaggcacuu

SEQ ID NO: 575 - RNA, 27 nt, Artificial Sequence
  Synthetic oligonucleotide
uccaaugccauccacuugauaggcacu

SEQ ID NO: 576 - RNA, 27 nt, Artificial Sequence
  Synthetic oligonucleotide
ccaugaucauguagacaucgaugguac

SEQ ID NO: 577 - RNA, 27 nt, Artificial Sequence
  Synthetic oligonucleotide
accaugaucauguagacaucgauggua

SEQ ID NO: 578 - RNA, 27 nt, Artificial Sequence
  Synthetic oligonucleotide
gaccaugaucauguagacaucgauggu

SEQ ID NO: 579 - RNA, 27 nt, Artificial Sequence
  Synthetic oligonucleotide
ugaccaugaucauguagacaucgaugg

SEQ ID NO: 580 - RNA, 27 nt, Artificial Sequence
  Synthetic oligonucleotide
uugaccaugaucauguagacaucgaug

SEQ ID NO: 581 - RNA, 27 nt, Artificial Sequence
  Synthetic oligonucleotide
cuugaccaugaucauguagacaucgau

SEQ ID NO: 582 - RNA, 27 nt, Artificial Sequence
  Synthetic oligonucleotide
acuugaccaugaucauguagacaucga

SEQ ID NO: 583 - RNA, 27 nt, Artificial Sequence
  Synthetic oligonucleotide
cacuugaccaugaucauguagacaucg

SEQ ID NO: 584 - RNA, 27 nt, Artificial Sequence
  Synthetic oligonucleotide
gcacuugaccaugaucauguagacauc

SEQ ID NO: 585 - RNA, 27 nt, Artificial Sequence
  Synthetic oligonucleotide
agcacuugaccaugaucauguagacau

SEQ ID NO: 586 - RNA, 27 nt, Artificial Sequence
  Synthetic oligonucleotide
cagcacuugaccaugaucauguagaca

SEQ ID NO: 587 - RNA, 27 nt, Artificial Sequence
  Synthetic oligonucleotide
ccagcacuugaccaugaucauguagac

SEQ ID NO: 588 - RNA, 27 nt, Artificial Sequence
  Synthetic oligonucleotide
uccagcacuugaccaugaucauguaga

SEQ ID NO: 589 - RNA, 27 nt, Artificial Sequence
  Synthetic oligonucleotide
auccagcacuugaccaugaucauguag

SEQ ID NO: 590 - RNA, 27 nt, Artificial Sequence
  Synthetic oligonucleotide
cauccagcacuugaccaugaucaugua

SEQ ID NO: 591 - RNA, 27 nt, Artificial Sequence
  Synthetic oligonucleotide
ucauccagcacuugaccaugaucaugu

SEQ ID NO: 592 - RNA, 27 nt, Artificial Sequence
  Synthetic oligonucleotide
aucauccagcacuugaccaugaucaug

SEQ ID NO: 593 - RNA, 27 nt, Artificial Sequence
  Synthetic oligonucleotide
uaucauccagcacuugaccaugaucau

SEQ ID NO: 594 - RNA, 27 nt, Artificial Sequence
  Synthetic oligonucleotide
cuaucauccagcacuugaccaugauca

SEQ ID NO: 595 - RNA, 27 nt, Artificial Sequence
  Synthetic oligonucleotide
ucuaucauccagcacuugaccaugauc

SEQ ID NO: 596 - RNA, 27 nt, Artificial Sequence
  Synthetic oligonucleotide
gucuaucauccagcacuugaccaugau

SEQ ID NO: 597 - RNA, 27 nt, Artificial Sequence
  Synthetic oligonucleotide
cgucuaucauccagcacuugaccauga

SEQ ID NO: 598 - RNA, 27 nt, Artificial Sequence
  Synthetic oligonucleotide
gcgucuaucauccagcacuugaccaug

SEQ ID NO: 599 - RNA, 27 nt, Artificial Sequence
  Synthetic oligonucleotide
ugcgucuaucauccagcacuugaccau

SEQ ID NO: 600 - RNA, 27 nt, Artificial Sequence
  Synthetic oligonucleotide
cugcgucuaucauccagcacuugacca

SEQ ID NO: 601 - RNA, 27 nt, Artificial Sequence
  Synthetic oligonucleotide
ucugcgucuaucauccagcacuugacc

SEQ ID NO: 602 - RNA, 27 nt, Artificial Sequence
  Synthetic oligonucleotide
ggucucgggccauuuuggagaauucga

SEQ ID NO: 603 - RNA, 27 nt, Artificial Sequence
  Synthetic oligonucleotide
gggucucgggccauuuuggagaauucg

SEQ ID NO: 604 - RNA, 27 nt, Artificial Sequence
  Synthetic oligonucleotide
gacuuggcaaaugcauucuuucauccc

SEQ ID NO: 605 - RNA, 27 nt, Artificial Sequence
  Synthetic oligonucleotide
ggacuuggcaaaugcauucuuucaucc

SEQ ID NO: 606 - RNA, 27 nt, Artificial Sequence
  Synthetic oligonucleotide
aggacuuggcaaaugcauucuuucauc

SEQ ID NO: 607 - RNA, 27 nt, Artificial Sequence
  Synthetic oligonucleotide
uaggacuuggcaaaugcauucuuucau

SEQ ID NO: 608 - RNA, 27 nt, Artificial Sequence
  Synthetic oligonucleotide
guaggacuuggcaaaugcauucuuuca

SEQ ID NO: 609 - RNA, 27 nt, Artificial Sequence
  Synthetic oligonucleotide
aguccugcugguagucaggguugucca

SEQ ID NO: 610 - RNA, 27 nt, Artificial Sequence
  Synthetic oligonucleotide
aaguccugcugguagucaggguugucc

SEQ ID NO: 611 - RNA, 27 nt, Artificial Sequence
  Synthetic oligonucleotide
gaaguccugcugguagucaggguuguc

SEQ ID NO: 612 - RNA, 27 nt, Artificial Sequence
  Synthetic oligonucleotide
agaaguccugcugguagucaggguugu

SEQ ID NO: 613 - RNA, 27 nt, Artificial Sequence
  Synthetic oligonucleotide
aagaaguccugcugguagucaggguug

SEQ ID NO: 614 - RNA, 27 nt, Artificial Sequence
  Synthetic oligonucleotide
aaagaaguccugcugguagucaggguu

SEQ ID NO: 615 - RNA, 27 nt, Artificial Sequence
  Synthetic oligonucleotide
gaaagaaguccugcugguagucagggu

SEQ ID NO: 616 - RNA, 27 nt, Artificial Sequence
  Synthetic oligonucleotide
ggaaagaaguccugcugguagucaggg

SEQ ID NO: 617 - RNA, 27 nt, Artificial Sequence
  Synthetic oligonucleotide
ggagggaggcugcugcgcguugcgcug

SEQ ID NO: 618 - RNA, 27 nt, Artificial Sequence
  Synthetic oligonucleotide
aagaagaggagggaggcugcugcgcgu

SEQ ID NO: 619 - RNA, 27 nt, Artificial Sequence
  Synthetic oligonucleotide
cagugcgggaagaagaggagggaggcu

SEQ ID NO: 620 - RNA, 27 nt, Artificial Sequence
  Synthetic oligonucleotide
gcacagugcgggaagaagaggagggag

SEQ ID NO: 621 - RNA, 27 nt, Artificial Sequence
  Synthetic oligonucleotide
gcgcacagugcgggaagaagaggaggg

SEQ ID NO: 622 - RNA, 27 nt, Artificial Sequence
  Synthetic oligonucleotide
gagcgcacagugcgggaagaagaggag

SEQ ID NO: 623 - RNA, 27 nt, Artificial Sequence
  Synthetic oligonucleotide
gaggagcgcacagugcgggaagaagag

SEQ ID NO: 624 - RNA, 27 nt, Artificial Sequence
  Synthetic oligonucleotide
aggaggagcgcacagugcgggaagaag

SEQ ID NO: 625 - RNA, 27 nt, Artificial Sequence
  Synthetic oligonucleotide
caggaggagcgcacagugcgggaagaa

SEQ ID NO: 626 - RNA, 27 nt, Artificial Sequence
  Synthetic oligonucleotide
ccaggaggagcgcacagugcgggaaga

SEQ ID NO: 627 - RNA, 27 nt, Artificial Sequence
  Synthetic oligonucleotide
acgcccuagcccaggaggagcgcacag

SEQ ID NO: 628 - RNA, 27 nt, Artificial Sequence
  Synthetic oligonucleotide
cagacgcccuagcccaggaggagcgca

SEQ ID NO: 629 - RNA, 27 nt, Artificial Sequence
  Synthetic oligonucleotide
agcgcggucagcaacaccagcagugug

SEQ ID NO: 630 - RNA, 27 nt, Artificial Sequence
  Synthetic oligonucleotide
gagcgcggucagcaacaccagcagugu

SEQ ID NO: 631 - RNA, 27 nt, Artificial Sequence
  Synthetic oligonucleotide
agagcgcggucagcaacaccagcagug

SEQ ID NO: 632 - RNA, 27 nt, Artificial Sequence
  Synthetic oligonucleotide
cagagcgcggucagcaacaccagcagu

SEQ ID NO: 633 - RNA, 27 nt, Artificial Sequence
  Synthetic oligonucleotide
gcagagcgcggucagcaacaccagcag

SEQ ID NO: 634 - RNA, 27 nt, Artificial Sequence
  Synthetic oligonucleotide
cgcagagcgcggucagcaacaccagca

SEQ ID NO: 635 - RNA, 27 nt, Artificial Sequence
  Synthetic oligonucleotide
gcgcagagcgcggucagcaacaccagc

SEQ ID NO: 636 - RNA, 27 nt, Artificial Sequence
  Synthetic oligonucleotide
cggcgcagagcgcggucagcaacacca

SEQ ID NO: 637 - RNA, 27 nt, Artificial Sequence
  Synthetic oligonucleotide
gcggcgcagagcgcggucagcaacacc

SEQ ID NO: 638 - RNA, 27 nt, Artificial Sequence
  Synthetic oligonucleotide
ugcggcgcagagcgcggucagcaacac

SEQ ID NO: 639 - RNA, 27 nt, Artificial Sequence
  Synthetic oligonucleotide
cugcggcgcagagcgcggucagcaaca

SEQ ID NO: 640 - RNA, 27 nt, Artificial Sequence
  Synthetic oligonucleotide
caccugcggcgcagagcgcggucagca

SEQ ID NO: 641 - RNA, 27 nt, Artificial Sequence
  Synthetic oligonucleotide
ccaccugcggcgcagagcgcggucagc

SEQ ID NO: 642 - RNA, 27 nt, Artificial Sequence
  Synthetic oligonucleotide
ugcugaaucgcacagcaccaaucagga

SEQ ID NO: 643 - RNA, 27 nt, Artificial Sequence
  Synthetic oligonucleotide
uugcugaaucgcacagcaccaaucagg

SEQ ID NO: 644 - RNA, 27 nt, Artificial Sequence
  Synthetic oligonucleotide
guugcugaaucgcacagcaccaaucag

SEQ ID NO: 645 - RNA, 27 nt, Artificial Sequence
  Synthetic oligonucleotide
uuguugcugaaucgcacagcaccaauc

SEQ ID NO: 646 - RNA, 27 nt, Artificial Sequence
  Synthetic oligonucleotide
gguuguugcugaaucgcacagcaccaa

SEQ ID NO: 647 - RNA, 27 nt, Artificial Sequence
  Synthetic oligonucleotide
ggguuguugcugaaucgcacagcacca

SEQ ID NO: 648 - RNA, 27 nt, Artificial Sequence
  Synthetic oligonucleotide
cagcagcuuccauugggacagcuugga

SEQ ID NO: 649 - RNA, 27 nt, Artificial Sequence
  Synthetic oligonucleotide
cagcgaugggaacauugcugggcacag

SEQ ID NO: 650 - RNA, 27 nt, Artificial Sequence
  Synthetic oligonucleotide
cacagguggcaccaaagcuguacuucc

SEQ ID NO: 651 - RNA, 27 nt, Artificial Sequence
  Synthetic oligonucleotide
ccuaugccauuacaaacuuugcgacag

SEQ ID NO: 652 - RNA, 27 nt, Artificial Sequence
  Synthetic oligonucleotide
gaggaggagugcgcgugaaagaauccc

SEQ ID NO: 653 - RNA, 27 nt, Artificial Sequence
  Synthetic oligonucleotide
caagccugaaucagcaaaaagccuguu

SEQ ID NO: 654 - RNA, 27 nt, Artificial Sequence
  Synthetic oligonucleotide
caguccaguuaucaggccaagccugaa

SEQ ID NO: 655 - RNA, 27 nt, Artificial Sequence
  Synthetic oligonucleotide
gucaguccaguuaucaggccaagccug

SEQ ID NO: 656 - RNA, 27 nt, Artificial Sequence
  Synthetic oligonucleotide
gaggucaguccaguuaucaggccaagc

SEQ ID NO: 657 - RNA, 27 nt, Artificial Sequence
  Synthetic oligonucleotide
cagcacauccauagguacaguuggcgu

SEQ ID NO: 658 - RNA, 27 nt, Artificial Sequence
  Synthetic oligonucleotide
aagaggaggccacccacaaucccagug

SEQ ID NO: 659 - RNA, 27 nt, Artificial Sequence
  Synthetic oligonucleotide
aauaggccaaucccaagggccaccacc

SEQ ID NO: 660 - RNA, 27 nt, Artificial Sequence
  Synthetic oligonucleotide
ugacgucuucgcaugaauaggccaauc

SEQ ID NO: 661 - RNA, 27 nt, Artificial Sequence
  Synthetic oligonucleotide
gagcucucucucuugaagcaggcggcg

SEQ ID NO: 662 - RNA, 27 nt, Artificial Sequence
  Synthetic oligonucleotide
cgagcucucucucuugaagcaggcggc

SEQ ID NO: 663 - RNA, 27 nt, Artificial Sequence
  Synthetic oligonucleotide
acgagcucucucucuugaagcaggcgg

SEQ ID NO: 664 - RNA, 27 nt, Artificial Sequence
  Synthetic oligonucleotide
gaggcggcauacaugaggguuguccac

SEQ ID NO: 665 - RNA, 27 nt, Artificial Sequence
  Synthetic oligonucleotide
agacagaugcccaggaggcggcauaca

SEQ ID NO: 666 - RNA, 27 nt, Artificial Sequence
  Synthetic oligonucleotide
caggaggcaaccguagggcaugagcug

SEQ ID NO: 667 - RNA, 27 nt, Artificial Sequence
  Synthetic oligonucleotide
ccaggaggcaaccguagggcaugagcu

SEQ ID NO: 668 - RNA, 27 nt, Artificial Sequence
  Synthetic oligonucleotide
caagucacggugcaccaaacgccgauc

SEQ ID NO: 669 - RNA, 27 nt, Artificial Sequence
  Synthetic oligonucleotide
gcugccaagucacggugcaccaaacgc

SEQ ID NO: 670 - RNA, 27 nt, Artificial Sequence
  Synthetic oligonucleotide
cagcaccaagcaguuuggccagcccaa

SEQ ID NO: 671 - RNA, 27 nt, Artificial Sequence
  Synthetic oligonucleotide
ucagcaccaagcaguuuggccagccca

SEQ ID NO: 672 - RNA, 27 nt, Artificial Sequence
  Synthetic oligonucleotide
cuucagcaccaagcaguuuggccagcc

SEQ ID NO: 673 - RNA, 27 nt, Artificial Sequence
  Synthetic oligonucleotide
ucuucagcaccaagcaguuuggccagc

SEQ ID NO: 674 - RNA, 27 nt, Artificial Sequence
  Synthetic oligonucleotide
aucagcaucuaucauccagcacuugac

SEQ ID NO: 675 - RNA, 27 nt, Artificial Sequence
  Synthetic oligonucleotide
uaucagcaucuaucauccagcacuuga

SEQ ID NO: 676 - RNA, 27 nt, Artificial Sequence
  Synthetic oligonucleotide
cuaucagcaucuaucauccagcacuug

SEQ ID NO: 677 - RNA, 27 nt, Artificial Sequence
  Synthetic oligonucleotide
gcuaucagcaucuaucauccagcacuu

SEQ ID NO: 678 - RNA, 27 nt, Artificial Sequence
  Synthetic oligonucleotide
ggcuaucagcaucuaucauccagcacu

SEQ ID NO: 679 - RNA, 27 nt, Artificial Sequence
  Synthetic oligonucleotide
cggcuaucagcaucuaucauccagcac

SEQ ID NO: 680 - RNA, 27 nt, Artificial Sequence
  Synthetic oligonucleotide
gcggcuaucagcaucuaucauccagca

SEQ ID NO: 681 - RNA, 27 nt, Artificial Sequence
  Synthetic oligonucleotide
ggcggcuaucagcaucuaucauccagc

SEQ ID NO: 682 - RNA, 27 nt, Artificial Sequence
  Synthetic oligonucleotide
gggcggcuaucagcaucuaucauccag

SEQ ID NO: 683 - RNA, 27 nt, Artificial Sequence
  Synthetic oligonucleotide
ugggcggcuaucagcaucuaucaucca

SEQ ID NO: 684 - RNA, 27 nt, Artificial Sequence
  Synthetic oligonucleotide
cuuugggcggcuaucagcaucuaucau

SEQ ID NO: 685 - RNA, 27 nt, Artificial Sequence
  Synthetic oligonucleotide
aacuuugggcggcuaucagcaucuauc

SEQ ID NO: 686 - RNA, 27 nt, Artificial Sequence
  Synthetic oligonucleotide
aaggcgucuucuuugacacggcagcuc

SEQ ID NO: 687 - RNA, 27 nt, Artificial Sequence
  Synthetic oligonucleotide
gaaggcgucuucuuugacacggcagcu

SEQ ID NO: 688 - RNA, 27 nt, Artificial Sequence
  Synthetic oligonucleotide
agcuguaccgcugcaagaaggcgucuu

SEQ ID NO: 689 - RNA, 27 nt, Artificial Sequence
  Synthetic oligonucleotide
gagcuguaccgcugcaagaaggcgucu

SEQ ID NO: 690 - RNA, 27 nt, Artificial Sequence
  Synthetic oligonucleotide
ggagcuguaccgcugcaagaaggcguc

SEQ ID NO: 691 - RNA, 27 nt, Artificial Sequence
  Synthetic oligonucleotide
cggagcuguaccgcugcaagaaggcgu

SEQ ID NO: 692 - RNA, 27 nt, Artificial Sequence
  Synthetic oligonucleotide
ucggagcuguaccgcugcaagaaggcg

SEQ ID NO: 693 - RNA, 27 nt, Artificial Sequence
  Synthetic oligonucleotide
gucggagcuguaccgcugcaagaaggc

SEQ ID NO: 694 - RNA, 27 nt, Artificial Sequence
  Synthetic oligonucleotide
ggucggagcuguaccgcugcaagaagg

SEQ ID NO: 695 - RNA, 27 nt, Artificial Sequence
  Synthetic oligonucleotide
caucagaguuaugcuuuaaagccaguc

SEQ ID NO: 696 - RNA, 27 nt, Artificial Sequence
  Synthetic oligonucleotide
aaagugcaucaggagagaggcccacuu

SEQ ID NO: 697 - RNA, 27 nt, Artificial Sequence
  Synthetic oligonucleotide
caaagugcaucaggagagaggcccacu

SEQ ID NO: 698 - RNA, 27 nt, Artificial Sequence
  Synthetic oligonucleotide
ccaaagugcaucaggagagaggcccac

SEQ ID NO: 699 - RNA, 27 nt, Artificial Sequence
  Synthetic oligonucleotide
cccaaagugcaucaggagagaggccca

SEQ ID NO: 700 - RNA, 27 nt, Artificial Sequence
  Synthetic oligonucleotide
cuucccaaagugcaucaggagagaggc

SEQ ID NO: 701 - RNA, 27 nt, Artificial Sequence
  Synthetic oligonucleotide
guaccagacuacaagagugcaucaauc

SEQ ID NO: 702 - RNA, 27 nt, Artificial Sequence
  Synthetic oligonucleotide
gaaacagaaaacauagaaggaagucua

SEQ ID NO: 703 - RNA, 27 nt, Artificial Sequence
  Synthetic oligonucleotide
aaaacaaugaaacagaaaacauagaag

SEQ ID NO: 704 - RNA, 27 nt, Artificial Sequence
  Synthetic oligonucleotide
cugcaguuuaccaggaagaaaaacaua

SEQ ID NO: 705 - RNA, 27 nt, Artificial Sequence
  Synthetic oligonucleotide
gcugcaguuuaccaggaagaaaaacau

SEQ ID NO: 706 - RNA, 27 nt, Artificial Sequence
  Synthetic oligonucleotide
ggcugcaguuuaccaggaagaaaaaca

SEQ ID NO: 707 - RNA, 27 nt, Artificial Sequence
  Synthetic oligonucleotide
guuuggcugcaguuuaccaggaagaaa

SEQ ID NO: 708 - RNA, 27 nt, Artificial Sequence
  Synthetic oligonucleotide
aagggucacagcauuaggaagaucgaa

SEQ ID NO: 709 - RNA, 27 nt, Artificial Sequence
  Synthetic oligonucleotide
aaagggucacagcauuaggaagaucga

SEQ ID NO: 710 - RNA, 27 nt, Artificial Sequence
  Synthetic oligonucleotide
aaauuuacaguuaugaaguagcaacaa

SEQ ID NO: 711 - RNA, 27 nt, Artificial Sequence
  Synthetic oligonucleotide
guuaggaaaccagaggaugcugcaagc

SEQ ID NO: 712 - RNA, 27 nt, Artificial Sequence
  Synthetic oligonucleotide
uugcuacaguuagaguggcuugcaacg

SEQ ID NO: 713 - DNA, 27 bp, Artificial Sequence
  Synthetic oligonucleotide
ggcgcagcgcggccgcagcagcctccg

SEQ ID NO: 714 - DNA, 27 bp, Artificial Sequence
  Synthetic oligonucleotide
gcgcagcgcggccgcagcagcctccgc

SEQ ID NO: 715 - DNA, 27 bp, Artificial Sequence
  Synthetic oligonucleotide
gcagcgcggccgcagcagcctccgccc

SEQ ID NO: 716 - DNA, 27 bp, Artificial Sequence
  Synthetic oligonucleotide
cagcgctcctggcgctgctggctgcgc

SEQ ID NO: 717 - DNA, 27 bp, Artificial Sequence
  Synthetic oligonucleotide
gcgctcctggcgctgctggctgcgctc

SEQ ID NO: 718 - DNA, 27 bp, Artificial Sequence
  Synthetic oligonucleotide
gctcctggcgctgctggctgcgctctg

SEQ ID NO: 719 - DNA, 27 bp, Artificial Sequence
  Synthetic oligonucleotide
cagttgggcacttttgaagatcatttt

SEQ ID NO: 720 - DNA, 27 bp, Artificial Sequence
  Synthetic oligonucleotide
tgggaatttggaaattacctatgtgca

SEQ ID NO: 721 - DNA, 27 bp, Artificial Sequence
  Synthetic oligonucleotide
aattatgatctttccttcttaaagacc

SEQ ID NO: 722 - DNA, 27 bp, Artificial Sequence
  Synthetic oligonucleotide
gtggctggttatgtcctcattgccctc

SEQ ID NO: 723 - DNA, 27 bp, Artificial Sequence
  Synthetic oligonucleotide
tgcccatgagaaatttacaggaaatcc

SEQ ID NO: 724 - DNA, 27 bp, Artificial Sequence
  Synthetic oligonucleotide
cctgcatggcgccgtgcggttcagcaa

SEQ ID NO: 725 - DNA, 27 bp, Artificial Sequence
  Synthetic oligonucleotide
tggcgccgtgcggttcagcaacaaccc

SEQ ID NO: 726 - DNA, 27 bp, Artificial Sequence
  Synthetic oligonucleotide
tggcgccgtgcggttcagcaacaaccc

SEQ ID NO: 727 - DNA, 27 bp, Artificial Sequence
  Synthetic oligonucleotide
gcgccgtgcggttcagcaacaaccctg

SEQ ID NO: 728 - DNA, 27 bp, Artificial Sequence
  Synthetic oligonucleotide
cgccgtgcggttcagcaacaaccctgc

SEQ ID NO: 729 - DNA, 27 bp, Artificial Sequence
  Synthetic oligonucleotide
cagctgccaaaagtgtgatccaagctg

SEQ ID NO: 730 - DNA, 27 bp, Artificial Sequence
  Synthetic oligonucleotide
atctgtgcccagcagtgctccgggcgc

SEQ ID NO: 731 - DNA, 27 bp, Artificial Sequence
  Synthetic oligonucleotide
ctgtgcccagcagtgctccgggcgctg

SEQ ID NO: 732 - DNA, 27 bp, Artificial Sequence
  Synthetic oligonucleotide
gtgctccgggcgctgccgtggcaagtc

SEQ ID NO: 733 - DNA, 27 bp, Artificial Sequence
  Synthetic oligonucleotide
gagagcgactgcctggtctgccgcaaa

SEQ ID NO: 734 - DNA, 27 bp, Artificial Sequence
  Synthetic oligonucleotide
ctgcctggtctgccgcaaattccgaga

SEQ ID NO: 735 - DNA, 27 bp, Artificial Sequence
  Synthetic oligonucleotide
gacagatcacggctcgtgcgtccgagc

SEQ ID NO: 736 - DNA, 27 bp, Artificial Sequence
  Synthetic oligonucleotide
ccgcaaagtgtgtaacggaataggtat

SEQ ID NO: 737 - DNA, 27 bp, Artificial Sequence
  Synthetic oligonucleotide
cggaataggtattggtgaatttaaaga

SEQ ID NO: 738 - DNA, 27 bp, Artificial Sequence
  Synthetic oligonucleotide
ctacgaatattaaacacttcaaaaact

SEQ ID NO: 739 - DNA, 27 bp, Artificial Sequence
  Synthetic oligonucleotide
ccacaggaactggatattctgaaaacc

SEQ ID NO: 740 - DNA, 27 bp, Artificial Sequence
  Synthetic oligonucleotide
cacagggtttttgctgattcaggcttg

SEQ ID NO: 741 - DNA, 27 bp, Artificial Sequence
  Synthetic oligonucleotide
ttcaggaaacaaaaatttgtgctatgc

SEQ ID NO: 742 - DNA, 27 bp, Artificial Sequence
  Synthetic oligonucleotide
gtgctatgcaaatacaataaactggaa

SEQ ID NO: 743 - DNA, 27 bp, Artificial Sequence
  Synthetic oligonucleotide
ccggtcagaaaaccaaaattataagca

SEQ ID NO: 744 - DNA, 27 bp, Artificial Sequence
  Synthetic oligonucleotide
ctgcgtctcttgccggaatgtcagccg

SEQ ID NO: 745 - DNA, 27 bp, Artificial Sequence
  Synthetic oligonucleotide
gggccctcctcttgctgctggtggtgg

SEQ ID NO: 746 - DNA, 27 bp, Artificial Sequence
  Synthetic oligonucleotide
ggccctcctcttgctgctggtggtggc

SEQ ID NO: 747 - DNA, 27 bp, Artificial Sequence
  Synthetic oligonucleotide
ctcctcttgctgctggtggtggccctg

SEQ ID NO: 748 - DNA, 27 bp, Artificial Sequence
  Synthetic oligonucleotide
tcctcttgctgctggtggtggccctgg

SEQ ID NO: 749 - DNA, 27 bp, Artificial Sequence
  Synthetic oligonucleotide
cggaagcgcacgctgcggaggctgctg

SEQ ID NO: 750 - DNA, 27 bp, Artificial Sequence
  Synthetic oligonucleotide
aagcgcacgctgcggaggctgctgcag

SEQ ID NO: 751 - DNA, 27 bp, Artificial Sequence
  Synthetic oligonucleotide
aactgaattcaaaaagatcaaagtgct

SEQ ID NO: 752 - DNA, 27 bp, Artificial Sequence
  Synthetic oligonucleotide
caaagtgctgggctccggtgcgttcgg

SEQ ID NO: 753 - DNA, 27 bp, Artificial Sequence
  Synthetic oligonucleotide
aagtgctgggctccggtgcgttcggca

SEQ ID NO: 754 - DNA, 27 bp, Artificial Sequence
  Synthetic oligonucleotide
agtgctgggctccggtgcgttcggcac

SEQ ID NO: 755 - DNA, 27 bp, Artificial Sequence
  Synthetic oligonucleotide
gtgctgggctccggtgcgttcggcacg

SEQ ID NO: 756 - DNA, 27 bp, Artificial Sequence
  Synthetic oligonucleotide
tgctgggctccggtgcgttcggcacgg

SEQ ID NO: 757 - DNA, 27 bp, Artificial Sequence
  Synthetic oligonucleotide
cgtgtgccgcctgctgggcatctgcct

SEQ ID NO: 758 - DNA, 27 bp, Artificial Sequence
  Synthetic oligonucleotide
gtgtgccgcctgctgggcatctgcctc

SEQ ID NO: 759 - DNA, 27 bp, Artificial Sequence
  Synthetic oligonucleotide
gtgccgcctgctgggcatctgcctcac

SEQ ID NO: 760 - DNA, 27 bp, Artificial Sequence
  Synthetic oligonucleotide
caccgtgcagctcatcacgcagctcat

SEQ ID NO: 761 - DNA, 27 bp, Artificial Sequence
  Synthetic oligonucleotide
cgtgcagctcatcacgcagctcatgcc

SEQ ID NO: 762 - DNA, 27 bp, Artificial Sequence
  Synthetic oligonucleotide
cagctcatcacgcagctcatgcccttc

SEQ ID NO: 763 - DNA, 27 bp, Artificial Sequence
  Synthetic oligonucleotide
agctcatcacgcagctcatgcccttcg

SEQ ID NO: 764 - DNA, 27 bp, Artificial Sequence
  Synthetic oligonucleotide
cagctcatgcccttcggctgcctcctg

SEQ ID NO: 765 - DNA, 27 bp, Artificial Sequence
  Synthetic oligonucleotide
agctcatgcccttcggctgcctcctgg

SEQ ID NO: 766 - DNA, 27 bp, Artificial Sequence
  Synthetic oligonucleotide
ttggaggaccgtcgcttggtgcaccgc

SEQ ID NO: 767 - DNA, 27 bp, Artificial Sequence
  Synthetic oligonucleotide
ggaggaccgtcgcttggtgcaccgcga

SEQ ID NO: 768 - DNA, 27 bp, Artificial Sequence
  Synthetic oligonucleotide
gaggaccgtcgcttggtgcaccgcgac

SEQ ID NO: 769 - DNA, 27 bp, Artificial Sequence
  Synthetic oligonucleotide
aggaccgtcgcttggtgcaccgcgacc

SEQ ID NO: 770 - DNA, 27 bp, Artificial Sequence
  Synthetic oligonucleotide
gaccgtcgcttggtgcaccgcgacctg

SEQ ID NO: 771 - DNA, 27 bp, Artificial Sequence
  Synthetic oligonucleotide
ccgtcgcttggtgcaccgcgacctggc

SEQ ID NO: 772 - DNA, 27 bp, Artificial Sequence
  Synthetic oligonucleotide
gtcgcttggtgcaccgcgacctggcag

SEQ ID NO: 773 - DNA, 27 bp, Artificial Sequence
  Synthetic oligonucleotide
tcgcttggtgcaccgcgacctggcagc

SEQ ID NO: 774 - DNA, 27 bp, Artificial Sequence
  Synthetic oligonucleotide
gcttggtgcaccgcgacctggcagcca

SEQ ID NO: 775 - DNA, 27 bp, Artificial Sequence
  Synthetic oligonucleotide
ggcattggaatcaattttacacagaat

SEQ ID NO: 776 - DNA, 27 bp, Artificial Sequence
  Synthetic oligonucleotide
tcaagtgctggatgatagacgcagata

SEQ ID NO: 777 - DNA, 27 bp, Artificial Sequence
  Synthetic oligonucleotide
aagtgctggatgatagacgcagatagt

SEQ ID NO: 778 - DNA, 27 bp, Artificial Sequence
  Synthetic oligonucleotide
agtgctggatgatagacgcagatagtc

SEQ ID NO: 779 - DNA, 27 bp, Artificial Sequence
  Synthetic oligonucleotide
tgctggatgatagacgcagatagtcgc

SEQ ID NO: 780 - DNA, 27 bp, Artificial Sequence
  Synthetic oligonucleotide
ctcctgagctctctgagtgcaaccagc

SEQ ID NO: 781 - DNA, 27 bp, Artificial Sequence
  Synthetic oligonucleotide
ctgagctctctgagtgcaaccagcaac

SEQ ID NO: 782 - DNA, 27 bp, Artificial Sequence
  Synthetic oligonucleotide
aagctgtcccatcaaggaagacagctt

SEQ ID NO: 783 - DNA, 27 bp, Artificial Sequence
  Synthetic oligonucleotide
agctgtcccatcaaggaagacagcttc

SEQ ID NO: 784 - DNA, 27 bp, Artificial Sequence
  Synthetic oligonucleotide
aagacagcttcttgcagcgatacagct

SEQ ID NO: 785 - DNA, 27 bp, Artificial Sequence
  Synthetic oligonucleotide
agacagcttcttgcagcgatacagctc

SEQ ID NO: 786 - DNA, 27 bp, Artificial Sequence
  Synthetic oligonucleotide
gacagcttcttgcagcgatacagctca

SEQ ID NO: 787 - DNA, 27 bp, Artificial Sequence
  Synthetic oligonucleotide
acagcttcttgcagcgatacagctcag

SEQ ID NO: 788 - DNA, 27 bp, Artificial Sequence
  Synthetic oligonucleotide
cagcttcttgcagcgatacagctcaga

SEQ ID NO: 789 - DNA, 27 bp, Artificial Sequence
  Synthetic oligonucleotide
gcttcttgcagcgatacagctcagacc

SEQ ID NO: 790 - DNA, 27 bp, Artificial Sequence
  Synthetic oligonucleotide
ccacaaagcagtgaatttattggagca

SEQ ID NO: 791 - DNA, 27 bp, Artificial Sequence
  Synthetic oligonucleotide
gtatatttgaaaaaaaaaaaaagtata

SEQ ID NO: 792 - DNA, 27 bp, Artificial Sequence
  Synthetic oligonucleotide
tgtgaggatttttattgattggggatc

SEQ ID NO: 793 - DNA, 27 bp, Artificial Sequence
  Synthetic oligonucleotide
cgctattgatttttacttcaatgggct

SEQ ID NO: 794 - DNA, 27 bp, Artificial Sequence
  Synthetic oligonucleotide
aaggaagaagcttgctggtagcacttg

SEQ ID NO: 795 - DNA, 27 bp, Artificial Sequence
  Synthetic oligonucleotide
aggaagaagcttgctggtagcacttgc

SEQ ID NO: 796 - DNA, 27 bp, Artificial Sequence
  Synthetic oligonucleotide
ggaagaagcttgctggtagcacttgct

SEQ ID NO: 797 - DNA, 27 bp, Artificial Sequence
  Synthetic oligonucleotide
gaagaagcttgctggtagcacttgcta

SEQ ID NO: 798 - DNA, 27 bp, Artificial Sequence
  Synthetic oligonucleotide
aagaagcttgctggtagcacttgctac

SEQ ID NO: 799 - DNA, 27 bp, Artificial Sequence
  Synthetic oligonucleotide
gaagcttgctggtagcacttgctaccc

SEQ ID NO: 800 - DNA, 27 bp, Artificial Sequence
  Synthetic oligonucleotide
aagcttgctggtagcacttgctaccct

SEQ ID NO: 801 - DNA, 27 bp, Artificial Sequence
  Synthetic oligonucleotide
agcttgctggtagcacttgctaccctg

SEQ ID NO: 802 - DNA, 27 bp, Artificial Sequence
  Synthetic oligonucleotide
gcttgctggtagcacttgctaccctga

SEQ ID NO: 803 - DNA, 27 bp, Artificial Sequence
  Synthetic oligonucleotide
cttgctggtagcacttgctaccctgag

SEQ ID NO: 804 - DNA, 27 bp, Artificial Sequence
  Synthetic oligonucleotide
ttgctggtagcacttgctaccctgagt

SEQ ID NO: 805 - DNA, 27 bp, Artificial Sequence
  Synthetic oligonucleotide
ggatgcttgattccagtggttctgctt

SEQ ID NO: 806 - DNA, 27 bp, Artificial Sequence
  Synthetic oligonucleotide
gatgcttgattccagtggttctgcttc

SEQ ID NO: 807 - DNA, 27 bp, Artificial Sequence
  Synthetic oligonucleotide
agcaggccggatcggtactgtatcaag

SEQ ID NO: 808 - DNA, 27 bp, Artificial Sequence
  Synthetic oligonucleotide
gccggatcggtactgtatcaagtcatg

SEQ ID NO: 809 - DNA, 27 bp, Artificial Sequence
  Synthetic oligonucleotide
tccttagacttacttttgtaaaaatgt

SEQ ID NO: 810 - DNA, 27 bp, Artificial Sequence
  Synthetic oligonucleotide
ctgtcttgctgtcatgaaatcagcaag

SEQ ID NO: 811 - DNA, 27 bp, Artificial Sequence
  Synthetic oligonucleotide
cctaaggatagcaccgcttttgttctc

SEQ ID NO: 812 - DNA, 27 bp, Artificial Sequence
  Synthetic oligonucleotide
taaggatagcaccgcttttgttctcgc

SEQ ID NO: 813 - DNA, 27 bp, Artificial Sequence
  Synthetic oligonucleotide
aaggatagcaccgcttttgttctcgca

SEQ ID NO: 814 - DNA, 27 bp, Artificial Sequence
  Synthetic oligonucleotide
aggatagcaccgcttttgttctcgcaa

SEQ ID NO: 815 - DNA, 27 bp, Artificial Sequence
  Synthetic oligonucleotide
ggatagcaccgcttttgttctcgcaaa

SEQ ID NO: 816 - DNA, 27 bp, Artificial Sequence
  Synthetic oligonucleotide
gatagcaccgcttttgttctcgcaaaa

SEQ ID NO: 817 - DNA, 27 bp, Artificial Sequence
  Synthetic oligonucleotide
atagcaccgcttttgttctcgcaaaaa

SEQ ID NO: 818 - DNA, 27 bp, Artificial Sequence
  Synthetic oligonucleotide
tagcaccgcttttgttctcgcaaaaac

SEQ ID NO: 819 - DNA, 27 bp, Artificial Sequence
  Synthetic oligonucleotide
agcaccgcttttgttctcgcaaaaacg

SEQ ID NO: 820 - DNA, 27 bp, Artificial Sequence
  Synthetic oligonucleotide
accgcttttgttctcgcaaaaacgtat

SEQ ID NO: 821 - DNA, 27 bp, Artificial Sequence
  Synthetic oligonucleotide
ccgcttttgttctcgcaaaaacgtatc

SEQ ID NO: 822 - DNA, 27 bp, Artificial Sequence
  Synthetic oligonucleotide
cgcttttgttctcgcaaaaacgtatct

SEQ ID NO: 823 - DNA, 27 bp, Artificial Sequence
  Synthetic oligonucleotide
gcttttgttctcgcaaaaacgtatctc

SEQ ID NO: 824 - DNA, 27 bp, Artificial Sequence
  Synthetic oligonucleotide
tgttctcgcaaaaacgtatctcctaat

SEQ ID NO: 825 - DNA, 27 bp, Artificial Sequence
  Synthetic oligonucleotide
caaaattagtttgtgttacttatggaa

SEQ ID NO: 826 - DNA, 27 bp, Artificial Sequence
  Synthetic oligonucleotide
acttatggaagatagttttctcctttt

SEQ ID NO: 827 - DNA, 27 bp, Artificial Sequence
  Synthetic oligonucleotide
cttcaaaagctttttactcaaagagta

SEQ ID NO: 828 - DNA, 27 bp, Artificial Sequence
  Synthetic oligonucleotide
aaactagggtttgaaattgataatgct

SEQ ID NO: 829 - DNA, 27 bp, Artificial Sequence
  Synthetic oligonucleotide
cctaaaataatttctctacaattggaa

SEQ ID NO: 830 - DNA, 27 bp, Artificial Sequence
  Synthetic oligonucleotide
aacagcagtcctttgtaaacagtgttt

SEQ ID NO: 831 - DNA, 27 bp, Artificial Sequence
  Synthetic oligonucleotide
tccaatttatcaaggaagaaatggttc

SEQ ID NO: 832 - DNA, 27 bp, Artificial Sequence
  Synthetic oligonucleotide
catacaaaatgttccttttgcttttaa

SEQ ID NO: 833 - DNA, 27 bp, Artificial Sequence
  Synthetic oligonucleotide
atgttccttttgcttttaaagtaattt

SEQ ID NO: 834 - DNA, 27 bp, Artificial Sequence
  Synthetic oligonucleotide
tgttccttttgcttttaaagtaatttt

SEQ ID NO: 835 - DNA, 27 bp, Artificial Sequence
  Synthetic oligonucleotide
ttttgcttttaaagtaatttttgactc

SEQ ID NO: 836 - DNA, 27 bp, Artificial Sequence
  Synthetic oligonucleotide
ttgttaagaaagtatttgatttttgtc

SEQ ID NO: 837 - DNA, 27 bp, Artificial Sequence
  Synthetic oligonucleotide
atttggaaattacctatgtgcagagga

SEQ ID NO: 838 - DNA, 27 bp, Artificial Sequence
  Synthetic oligonucleotide
tttggaaattacctatgtgcagaggaa

SEQ ID NO: 839 - DNA, 27 bp, Artificial Sequence
  Synthetic oligonucleotide
atctttccttcttaaagaccatccagg

SEQ ID NO: 840 - DNA, 27 bp, Artificial Sequence
  Synthetic oligonucleotide
tctttccttcttaaagaccatccagga

SEQ ID NO: 841 - DNA, 27 bp, Artificial Sequence
  Synthetic oligonucleotide
ctttccttcttaaagaccatccaggag

SEQ ID NO: 842 - DNA, 27 bp, Artificial Sequence
  Synthetic oligonucleotide
tttccttcttaaagaccatccaggagg

SEQ ID NO: 843 - DNA, 27 bp, Artificial Sequence
  Synthetic oligonucleotide
ttccttcttaaagaccatccaggaggt

SEQ ID NO: 844 - DNA, 27 bp, Artificial Sequence
  Synthetic oligonucleotide
tccttcttaaagaccatccaggaggtg

SEQ ID NO: 845 - DNA, 27 bp, Artificial Sequence
  Synthetic oligonucleotide
ccttcttaaagaccatccaggaggtgg

SEQ ID NO: 846 - DNA, 27 bp, Artificial Sequence
  Synthetic oligonucleotide
cttcttaaagaccatccaggaggtggc

SEQ ID NO: 847 - DNA, 27 bp, Artificial Sequence
  Synthetic oligonucleotide
ttcttaaagaccatccaggaggtggct

SEQ ID NO: 848 - DNA, 27 bp, Artificial Sequence
  Synthetic oligonucleotide
tcttaaagaccatccaggaggtggctg

SEQ ID NO: 849 - DNA, 27 bp, Artificial Sequence
  Synthetic oligonucleotide
cttaaagaccatccaggaggtggctgg

SEQ ID NO: 850 - DNA, 27 bp, Artificial Sequence
  Synthetic oligonucleotide
ttaaagaccatccaggaggtggctggt

SEQ ID NO: 851 - DNA, 27 bp, Artificial Sequence
  Synthetic oligonucleotide
taaagaccatccaggaggtggctggtt

SEQ ID NO: 852 - DNA, 27 bp, Artificial Sequence
  Synthetic oligonucleotide
aaagaccatccaggaggtggctggtta

SEQ ID NO: 853 - DNA, 27 bp, Artificial Sequence
  Synthetic oligonucleotide
agtgtgatccaagctgtcccaatggga

SEQ ID NO: 854 - DNA, 27 bp, Artificial Sequence
  Synthetic oligonucleotide
gtgtgatccaagctgtcccaatgggag

SEQ ID NO: 855 - DNA, 27 bp, Artificial Sequence
  Synthetic oligonucleotide
tgtgatccaagctgtcccaatgggagc

SEQ ID NO: 856 - DNA, 27 bp, Artificial Sequence
  Synthetic oligonucleotide
gtgatccaagctgtcccaatgggagct

SEQ ID NO: 857 - DNA, 27 bp, Artificial Sequence
  Synthetic oligonucleotide
tgatccaagctgtcccaatgggagctg

SEQ ID NO: 858 - DNA, 27 bp, Artificial Sequence
  Synthetic oligonucleotide
gcaggagaggagaactgccagaaactg

SEQ ID NO: 859 - DNA, 27 bp, Artificial Sequence
  Synthetic oligonucleotide
caggagaggagaactgccagaaactga

SEQ ID NO: 860 - DNA, 27 bp, Artificial Sequence
  Synthetic oligonucleotide
aggagaggagaactgccagaaactgac

SEQ ID NO: 861 - DNA, 27 bp, Artificial Sequence
  Synthetic oligonucleotide
ggagaggagaactgccagaaactgacc

SEQ ID NO: 862 - DNA, 27 bp, Artificial Sequence
  Synthetic oligonucleotide
actgaccaaaatcatctgtgcccagca

SEQ ID NO: 863 - DNA, 27 bp, Artificial Sequence
  Synthetic oligonucleotide
ctgaccaaaatcatctgtgcccagcag

SEQ ID NO: 864 - DNA, 27 bp, Artificial Sequence
  Synthetic oligonucleotide
tgaccaaaatcatctgtgcccagcagt

SEQ ID NO: 865 - DNA, 27 bp, Artificial Sequence
  Synthetic oligonucleotide
gaccaaaatcatctgtgcccagcagtg

SEQ ID NO: 866 - DNA, 27 bp, Artificial Sequence
  Synthetic oligonucleotide
accaaaatcatctgtgcccagcagtgc

SEQ ID NO: 867 - DNA, 27 bp, Artificial Sequence
  Synthetic oligonucleotide
ccaaaatcatctgtgcccagcagtgct

SEQ ID NO: 868 - DNA, 27 bp, Artificial Sequence
  Synthetic oligonucleotide
caaaatcatctgtgcccagcagtgctc

SEQ ID NO: 869 - DNA, 27 bp, Artificial Sequence
  Synthetic oligonucleotide
cccagtgactgctgccacaaccagtgt

SEQ ID NO: 870 - DNA, 27 bp, Artificial Sequence
  Synthetic oligonucleotide
ccagtgactgctgccacaaccagtgtg

SEQ ID NO: 871 - DNA, 27 bp, Artificial Sequence
  Synthetic oligonucleotide
cagtgactgctgccacaaccagtgtgc

SEQ ID NO: 872 - DNA, 27 bp, Artificial Sequence
  Synthetic oligonucleotide
ctcactctccataaatgctacgaatat

SEQ ID NO: 873 - DNA, 27 bp, Artificial Sequence
  Synthetic oligonucleotide
ggtttttgctgattcaggcttggcctg

SEQ ID NO: 874 - DNA, 27 bp, Artificial Sequence
  Synthetic oligonucleotide
gtttttgctgattcaggcttggcctga

SEQ ID NO: 875 - DNA, 27 bp, Artificial Sequence
  Synthetic oligonucleotide
tttttgctgattcaggcttggcctgaa

SEQ ID NO: 876 - DNA, 27 bp, Artificial Sequence
  Synthetic oligonucleotide
ttttgctgattcaggcttggcctgaaa

SEQ ID NO: 877 - DNA, 27 bp, Artificial Sequence
  Synthetic oligonucleotide
tttgctgattcaggcttggcctgaaaa

SEQ ID NO: 878 - DNA, 27 bp, Artificial Sequence
  Synthetic oligonucleotide
ttgctgattcaggcttggcctgaaaac

SEQ ID NO: 879 - DNA, 27 bp, Artificial Sequence
  Synthetic oligonucleotide
tgctgattcaggcttggcctgaaaaca

SEQ ID NO: 880 - DNA, 27 bp, Artificial Sequence
  Synthetic oligonucleotide
gctgattcaggcttggcctgaaaacag

SEQ ID NO: 881 - DNA, 27 bp, Artificial Sequence
  Synthetic oligonucleotide
ccaagcaacatggtcagttttctcttg

SEQ ID NO: 882 - DNA, 27 bp, Artificial Sequence
  Synthetic oligonucleotide
caagcaacatggtcagttttctcttgc

SEQ ID NO: 883 - DNA, 27 bp, Artificial Sequence
  Synthetic oligonucleotide
aagcaacatggtcagttttctcttgca

SEQ ID NO: 884 - DNA, 27 bp, Artificial Sequence
  Synthetic oligonucleotide
tacaataaactggaaaaaactgtttgg

SEQ ID NO: 885 - DNA, 27 bp, Artificial Sequence
  Synthetic oligonucleotide
ctcaggccatgaacatcacctgcacag

SEQ ID NO: 886 - DNA, 27 bp, Artificial Sequence
  Synthetic oligonucleotide
tcaggccatgaacatcacctgcacagg

SEQ ID NO: 887 - DNA, 27 bp, Artificial Sequence
  Synthetic oligonucleotide
gtatccagtgtgcccactacattgacg

SEQ ID NO: 888 - DNA, 27 bp, Artificial Sequence
  Synthetic oligonucleotide
tatccagtgtgcccactacattgacgg

SEQ ID NO: 889 - DNA, 27 bp, Artificial Sequence
  Synthetic oligonucleotide
atccagtgtgcccactacattgacggc

SEQ ID NO: 890 - DNA, 27 bp, Artificial Sequence
  Synthetic oligonucleotide
tccagtgtgcccactacattgacggcc

SEQ ID NO: 891 - DNA, 27 bp, Artificial Sequence
  Synthetic oligonucleotide
ccagtgtgcccactacattgacggccc

SEQ ID NO: 892 - DNA, 27 bp, Artificial Sequence
  Synthetic oligonucleotide
ctgaattcaaaaagatcaaagtgctgg

SEQ ID NO: 893 - DNA, 27 bp, Artificial Sequence
  Synthetic oligonucleotide
tgaattcaaaaagatcaaagtgctggg

SEQ ID NO: 894 - DNA, 27 bp, Artificial Sequence
  Synthetic oligonucleotide
gactctggatcccagaaggtgagaaag

SEQ ID NO: 895 - DNA, 27 bp, Artificial Sequence
  Synthetic oligonucleotide
actctggatcccagaaggtgagaaagt

SEQ ID NO: 896 - DNA, 27 bp, Artificial Sequence
  Synthetic oligonucleotide
ctctggatcccagaaggtgagaaagtt

SEQ ID NO: 897 - DNA, 27 bp, Artificial Sequence
  Synthetic oligonucleotide
tctggatcccagaaggtgagaaagtta

SEQ ID NO: 898 - DNA, 27 bp, Artificial Sequence
  Synthetic oligonucleotide
ctggatcccagaaggtgagaaagttaa

SEQ ID NO: 899 - DNA, 27 bp, Artificial Sequence
  Synthetic oligonucleotide
tggatcccagaaggtgagaaagttaaa

SEQ ID NO: 900 - DNA, 27 bp, Artificial Sequence
  Synthetic oligonucleotide
ggatcccagaaggtgagaaagttaaaa

SEQ ID NO: 901 - DNA, 27 bp, Artificial Sequence
  Synthetic oligonucleotide
gatcccagaaggtgagaaagttaaaat

SEQ ID NO: 902 - DNA, 27 bp, Artificial Sequence
  Synthetic oligonucleotide
cgcagcatgtcaagatcacagattttg

SEQ ID NO: 903 - DNA, 27 bp, Artificial Sequence
  Synthetic oligonucleotide
gcagcatgtcaagatcacagattttgg

SEQ ID NO: 904 - DNA, 27 bp, Artificial Sequence
  Synthetic oligonucleotide
cagcatgtcaagatcacagattttggg

SEQ ID NO: 905 - DNA, 27 bp, Artificial Sequence
  Synthetic oligonucleotide
agcatgtcaagatcacagattttgggc

SEQ ID NO: 906 - DNA, 27 bp, Artificial Sequence
  Synthetic oligonucleotide
gcatgtcaagatcacagattttgggct

SEQ ID NO: 907 - DNA, 27 bp, Artificial Sequence
  Synthetic oligonucleotide
catgtcaagatcacagattttgggctg

SEQ ID NO: 908 - DNA, 27 bp, Artificial Sequence
  Synthetic oligonucleotide
atgtcaagatcacagattttgggctgg

SEQ ID NO: 909 - DNA, 27 bp, Artificial Sequence
  Synthetic oligonucleotide
tgtcaagatcacagattttgggctggc

SEQ ID NO: 910 - DNA, 27 bp, Artificial Sequence
  Synthetic oligonucleotide
gtcaagatcacagattttgggctggcc

SEQ ID NO: 911 - DNA, 27 bp, Artificial Sequence
  Synthetic oligonucleotide
tcaagatcacagattttgggctggcca

SEQ ID NO: 912 - DNA, 27 bp, Artificial Sequence
  Synthetic oligonucleotide
caagatcacagattttgggctggccaa

SEQ ID NO: 913 - DNA, 27 bp, Artificial Sequence
  Synthetic oligonucleotide
aagatcacagattttgggctggccaaa

SEQ ID NO: 914 - DNA, 27 bp, Artificial Sequence
  Synthetic oligonucleotide
agatcacagattttgggctggccaaac

SEQ ID NO: 915 - DNA, 27 bp, Artificial Sequence
  Synthetic oligonucleotide
gatcacagattttgggctggccaaact

SEQ ID NO: 916 - DNA, 27 bp, Artificial Sequence
  Synthetic oligonucleotide
atcacagattttgggctggccaaactg

SEQ ID NO: 917 - DNA, 27 bp, Artificial Sequence
  Synthetic oligonucleotide
tcacagattttgggctggccaaactgc

SEQ ID NO: 918 - DNA, 27 bp, Artificial Sequence
  Synthetic oligonucleotide
cacagattttgggctggccaaactgct

SEQ ID NO: 919 - DNA, 27 bp, Artificial Sequence
  Synthetic oligonucleotide
acagattttgggctggccaaactgctg

SEQ ID NO: 920 - DNA, 27 bp, Artificial Sequence
  Synthetic oligonucleotide
cagattttgggctggccaaactgctgg

SEQ ID NO: 921 - DNA, 27 bp, Artificial Sequence
  Synthetic oligonucleotide
agattttgggctggccaaactgctggg

SEQ ID NO: 922 - DNA, 27 bp, Artificial Sequence
  Synthetic oligonucleotide
gattttgggctggccaaactgctgggt

SEQ ID NO: 923 - DNA, 27 bp, Artificial Sequence
  Synthetic oligonucleotide
attttgggctggccaaactgctgggtg

SEQ ID NO: 924 - DNA, 27 bp, Artificial Sequence
  Synthetic oligonucleotide
ttttgggctggccaaactgctgggtgc

SEQ ID NO: 925 - DNA, 27 bp, Artificial Sequence
  Synthetic oligonucleotide
aggcaaagtgcctatcaagtggatggc

SEQ ID NO: 926 - DNA, 27 bp, Artificial Sequence
  Synthetic oligonucleotide
ggcaaagtgcctatcaagtggatggca

SEQ ID NO: 927 - DNA, 27 bp, Artificial Sequence
  Synthetic oligonucleotide
gcaaagtgcctatcaagtggatggcat

SEQ ID NO: 928 - DNA, 27 bp, Artificial Sequence
  Synthetic oligonucleotide
caaagtgcctatcaagtggatggcatt

SEQ ID NO: 929 - DNA, 27 bp, Artificial Sequence
  Synthetic oligonucleotide
aaagtgcctatcaagtggatggcattg

SEQ ID NO: 930 - DNA, 27 bp, Artificial Sequence
  Synthetic oligonucleotide
aagtgcctatcaagtggatggcattgg

SEQ ID NO: 931 - DNA, 27 bp, Artificial Sequence
  Synthetic oligonucleotide
agtgcctatcaagtggatggcattgga

SEQ ID NO: 932 - DNA, 27 bp, Artificial Sequence
  Synthetic oligonucleotide
gtaccatcgatgtctacatgatcatgg

SEQ ID NO: 933 - DNA, 27 bp, Artificial Sequence
  Synthetic oligonucleotide
taccatcgatgtctacatgatcatggt

SEQ ID NO: 934 - DNA, 27 bp, Artificial Sequence
  Synthetic oligonucleotide
accatcgatgtctacatgatcatggtc

SEQ ID NO: 935 - DNA, 27 bp, Artificial Sequence
  Synthetic oligonucleotide
ccatcgatgtctacatgatcatggtca

SEQ ID NO: 936 - DNA, 27 bp, Artificial Sequence
  Synthetic oligonucleotide
catcgatgtctacatgatcatggtcaa

SEQ ID NO: 937 - DNA, 27 bp, Artificial Sequence
  Synthetic oligonucleotide
atcgatgtctacatgatcatggtcaag

SEQ ID NO: 938 - DNA, 27 bp, Artificial Sequence
  Synthetic oligonucleotide
tcgatgtctacatgatcatggtcaagt

SEQ ID NO: 939 - DNA, 27 bp, Artificial Sequence
  Synthetic oligonucleotide
cgatgtctacatgatcatggtcaagtg

SEQ ID NO: 940 - DNA, 27 bp, Artificial Sequence
  Synthetic oligonucleotide
gatgtctacatgatcatggtcaagtgc

SEQ ID NO: 941 - DNA, 27 bp, Artificial Sequence
  Synthetic oligonucleotide
atgtctacatgatcatggtcaagtgct

SEQ ID NO: 942 - DNA, 27 bp, Artificial Sequence
  Synthetic oligonucleotide
tgtctacatgatcatggtcaagtgctg

SEQ ID NO: 943 - DNA, 27 bp, Artificial Sequence
  Synthetic oligonucleotide
gtctacatgatcatggtcaagtgctgg

SEQ ID NO: 944 - DNA, 27 bp, Artificial Sequence
  Synthetic oligonucleotide
tctacatgatcatggtcaagtgctgga

SEQ ID NO: 945 - DNA, 27 bp, Artificial Sequence
  Synthetic oligonucleotide
ctacatgatcatggtcaagtgctggat

SEQ ID NO: 946 - DNA, 27 bp, Artificial Sequence
  Synthetic oligonucleotide
tacatgatcatggtcaagtgctggatg

SEQ ID NO: 947 - DNA, 27 bp, Artificial Sequence
  Synthetic oligonucleotide
acatgatcatggtcaagtgctggatga

SEQ ID NO: 948 - DNA, 27 bp, Artificial Sequence
  Synthetic oligonucleotide
catgatcatggtcaagtgctggatgat

SEQ ID NO: 949 - DNA, 27 bp, Artificial Sequence
  Synthetic oligonucleotide
atgatcatggtcaagtgctggatgata

SEQ ID NO: 950 - DNA, 27 bp, Artificial Sequence
  Synthetic oligonucleotide
tgatcatggtcaagtgctggatgatag

SEQ ID NO: 951 - DNA, 27 bp, Artificial Sequence
  Synthetic oligonucleotide
gatcatggtcaagtgctggatgataga

SEQ ID NO: 952 - DNA, 27 bp, Artificial Sequence
  Synthetic oligonucleotide
atcatggtcaagtgctggatgatagac

SEQ ID NO: 953 - DNA, 27 bp, Artificial Sequence
  Synthetic oligonucleotide
tcatggtcaagtgctggatgatagacg

SEQ ID NO: 954 - DNA, 27 bp, Artificial Sequence
  Synthetic oligonucleotide
catggtcaagtgctggatgatagacgc

SEQ ID NO: 955 - DNA, 27 bp, Artificial Sequence
  Synthetic oligonucleotide
atggtcaagtgctggatgatagacgca

SEQ ID NO: 956 - DNA, 27 bp, Artificial Sequence
  Synthetic oligonucleotide
tggtcaagtgctggatgatagacgcag

SEQ ID NO: 957 - DNA, 27 bp, Artificial Sequence
  Synthetic oligonucleotide
ggtcaagtgctggatgatagacgcaga

SEQ ID NO: 958 - DNA, 27 bp, Artificial Sequence
  Synthetic oligonucleotide
tcgaattctccaaaatggcccgagacc

SEQ ID NO: 959 - DNA, 27 bp, Artificial Sequence
  Synthetic oligonucleotide
cgaattctccaaaatggcccgagaccc

SEQ ID NO: 960 - DNA, 27 bp, Artificial Sequence
  Synthetic oligonucleotide
gggatgaaagaatgcatttgccaagtc

SEQ ID NO: 961 - DNA, 27 bp, Artificial Sequence
  Synthetic oligonucleotide
ggatgaaagaatgcatttgccaagtcc

SEQ ID NO: 962 - DNA, 27 bp, Artificial Sequence
  Synthetic oligonucleotide
gatgaaagaatgcatttgccaagtcct

SEQ ID NO: 963 - DNA, 27 bp, Artificial Sequence
  Synthetic oligonucleotide
atgaaagaatgcatttgccaagtccta

SEQ ID NO: 964 - DNA, 27 bp, Artificial Sequence
  Synthetic oligonucleotide
tgaaagaatgcatttgccaagtcctac

SEQ ID NO: 965 - DNA, 27 bp, Artificial Sequence
  Synthetic oligonucleotide
tggacaaccctgactaccagcaggact

SEQ ID NO: 966 - DNA, 27 bp, Artificial Sequence
  Synthetic oligonucleotide
ggacaaccctgactaccagcaggactt

SEQ ID NO: 967 - DNA, 27 bp, Artificial Sequence
  Synthetic oligonucleotide
gacaaccctgactaccagcaggacttc

SEQ ID NO: 968 - DNA, 27 bp, Artificial Sequence
  Synthetic oligonucleotide
acaaccctgactaccagcaggacttct

SEQ ID NO: 969 - DNA, 27 bp, Artificial Sequence
  Synthetic oligonucleotide
caaccctgactaccagcaggacttctt

SEQ ID NO: 970 - DNA, 27 bp, Artificial Sequence
  Synthetic oligonucleotide
aaccctgactaccagcaggacttcttt

SEQ ID NO: 971 - DNA, 27 bp, Artificial Sequence
  Synthetic oligonucleotide
accctgactaccagcaggacttctttc

SEQ ID NO: 972 - DNA, 27 bp, Artificial Sequence
  Synthetic oligonucleotide
ccctgactaccagcaggacttctttcc

SEQ ID NO: 973 - DNA, 27 bp, Artificial Sequence
  Synthetic oligonucleotide
cagcgcaacgcgcagcagcctccctcc

SEQ ID NO: 974 - DNA, 27 bp, Artificial Sequence
  Synthetic oligonucleotide
acgcgcagcagcctccctcctcttctt

SEQ ID NO: 975 - DNA, 27 bp, Artificial Sequence
  Synthetic oligonucleotide
agcctccctcctcttcttcccgcactg

SEQ ID NO: 976 - DNA, 27 bp, Artificial Sequence
  Synthetic oligonucleotide
ctccctcctcttcttcccgcactgtgc

SEQ ID NO: 977 - DNA, 27 bp, Artificial Sequence
  Synthetic oligonucleotide
ccctcctcttcttcccgcactgtgcgc

SEQ ID NO: 978 - DNA, 27 bp, Artificial Sequence
  Synthetic oligonucleotide
ctcctcttcttcccgcactgtgcgctc

SEQ ID NO: 979 - DNA, 27 bp, Artificial Sequence
  Synthetic oligonucleotide
ctcttcttcccgcactgtgcgctcctc

SEQ ID NO: 980 - DNA, 27 bp, Artificial Sequence
  Synthetic oligonucleotide
cttcttcccgcactgtgcgctcctcct

SEQ ID NO: 981 - DNA, 27 bp, Artificial Sequence
  Synthetic oligonucleotide
ttcttcccgcactgtgcgctcctcctg

SEQ ID NO: 982 - DNA, 27 bp, Artificial Sequence
  Synthetic oligonucleotide
tcttcccgcactgtgcgctcctcctgg

SEQ ID NO: 983 - DNA, 27 bp, Artificial Sequence
  Synthetic oligonucleotide
ctgtgcgctcctcctgggctagggcgt

SEQ ID NO: 984 - DNA, 27 bp, Artificial Sequence
  Synthetic oligonucleotide
tgcgctcctcctgggctagggcgtctg

SEQ ID NO: 985 - DNA, 27 bp, Artificial Sequence
  Synthetic oligonucleotide
cacactgctggtgttgctgaccgcgct

SEQ ID NO: 986 - DNA, 27 bp, Artificial Sequence
  Synthetic oligonucleotide
acactgctggtgttgctgaccgcgctc

SEQ ID NO: 987 - DNA, 27 bp, Artificial Sequence
  Synthetic oligonucleotide
cactgctggtgttgctgaccgcgctct

SEQ ID NO: 988 - DNA, 27 bp, Artificial Sequence
  Synthetic oligonucleotide
actgctggtgttgctgaccgcgctctg

SEQ ID NO: 989 - DNA, 27 bp, Artificial Sequence
  Synthetic oligonucleotide
ctgctggtgttgctgaccgcgctctgc

SEQ ID NO: 990 - DNA, 27 bp, Artificial Sequence
  Synthetic oligonucleotide
tgctggtgttgctgaccgcgctctgcg

SEQ ID NO: 991 - DNA, 27 bp, Artificial Sequence
  Synthetic oligonucleotide
gctggtgttgctgaccgcgctctgcgc

SEQ ID NO: 992 - DNA, 27 bp, Artificial Sequence
  Synthetic oligonucleotide
tggtgttgctgaccgcgctctgcgccg

SEQ ID NO: 993 - DNA, 27 bp, Artificial Sequence
  Synthetic oligonucleotide
ggtgttgctgaccgcgctctgcgccgc

SEQ ID NO: 994 - DNA, 27 bp, Artificial Sequence
  Synthetic oligonucleotide
gtgttgctgaccgcgctctgcgccgca

SEQ ID NO: 995 - DNA, 27 bp, Artificial Sequence
  Synthetic oligonucleotide
tgttgctgaccgcgctctgcgccgcag

SEQ ID NO: 996 - DNA, 27 bp, Artificial Sequence
  Synthetic oligonucleotide
tgctgaccgcgctctgcgccgcaggtg

SEQ ID NO: 997 - DNA, 27 bp, Artificial Sequence
  Synthetic oligonucleotide
gctgaccgcgctctgcgccgcaggtgg

SEQ ID NO: 998 - DNA, 27 bp, Artificial Sequence
  Synthetic oligonucleotide
tcctgattggtgctgtgcgattcagca

SEQ ID NO: 999 - DNA, 27 bp, Artificial Sequence
  Synthetic oligonucleotide
cctgattggtgctgtgcgattcagcaa

SEQ ID NO: 1000 - DNA, 27 bp, Artificial Sequence
  Synthetic oligonucleotide
ctgattggtgctgtgcgattcagcaac

SEQ ID NO: 1001 - DNA, 27 bp, Artificial Sequence
  Synthetic oligonucleotide
gattggtgctgtgcgattcagcaacaa

SEQ ID NO: 1002 - DNA, 27 bp, Artificial Sequence
  Synthetic oligonucleotide
ttggtgctgtgcgattcagcaacaacc

SEQ ID NO: 1003 - DNA, 27 bp, Artificial Sequence
  Synthetic oligonucleotide
tggtgctgtgcgattcagcaacaaccc

SEQ ID NO: 1004 - DNA, 27 bp, Artificial Sequence
  Synthetic oligonucleotide
tccaagctgtcccaatggaagctgctg

SEQ ID NO: 1005 - DNA, 27 bp, Artificial Sequence
  Synthetic oligonucleotide
ctgtgcccagcaatgttcccatcgctg

SEQ ID NO: 1006 - DNA, 27 bp, Artificial Sequence
  Synthetic oligonucleotide
ggaagtacagctttggtgccacctgtg

SEQ ID NO: 1007 - DNA, 27 bp, Artificial Sequence
  Synthetic oligonucleotide
ctgtcgcaaagtttgtaatggcatagg

SEQ ID NO: 1008 - DNA, 27 bp, Artificial Sequence
  Synthetic oligonucleotide
gggattctttcacgcgcactcctcctc

SEQ ID NO: 1009 - DNA, 27 bp, Artificial Sequence
  Synthetic oligonucleotide
aacaggctttttgctgattcaggcttg

SEQ ID NO: 1010 - DNA, 27 bp, Artificial Sequence
  Synthetic oligonucleotide
ttcaggcttggcctgataactggactg

SEQ ID NO: 1011 - DNA, 27 bp, Artificial Sequence
  Synthetic oligonucleotide
caggcttggcctgataactggactgac

SEQ ID NO: 1012 - DNA, 27 bp, Artificial Sequence
  Synthetic oligonucleotide
gcttggcctgataactggactgacctc

SEQ ID NO: 1013 - DNA, 27 bp, Artificial Sequence
  Synthetic oligonucleotide
acgccaactgtacctatggatgtgctg

SEQ ID NO: 1014 - DNA, 27 bp, Artificial Sequence
  Synthetic oligonucleotide
cactgggattgtgggtggcctcctctt

SEQ ID NO: 1015 - DNA, 27 bp, Artificial Sequence
  Synthetic oligonucleotide
ggtggtggcccttgggattggcctatt

SEQ ID NO: 1016 - DNA, 27 bp, Artificial Sequence
  Synthetic oligonucleotide
gattggcctattcatgcgaagacgtca

SEQ ID NO: 1017 - DNA, 27 bp, Artificial Sequence
  Synthetic oligonucleotide
cgccgcctgcttcaagagagagagctc

SEQ ID NO: 1018 - DNA, 27 bp, Artificial Sequence
  Synthetic oligonucleotide
gccgcctgcttcaagagagagagctcg

SEQ ID NO: 1019 - DNA, 27 bp, Artificial Sequence
  Synthetic oligonucleotide
ccgcctgcttcaagagagagagctcgt

SEQ ID NO: 1020 - DNA, 27 bp, Artificial Sequence
  Synthetic oligonucleotide
gtggacaaccctcatgtatgccgcctc

SEQ ID NO: 1021 - DNA, 27 bp, Artificial Sequence
  Synthetic oligonucleotide
tgtatgccgcctcctgggcatctgtct

SEQ ID NO: 1022 - DNA, 27 bp, Artificial Sequence
  Synthetic oligonucleotide
cagctcatgccctacggttgcctcctg

SEQ ID NO: 1023 - DNA, 27 bp, Artificial Sequence
  Synthetic oligonucleotide
agctcatgccctacggttgcctcctgg

SEQ ID NO: 1024 - DNA, 27 bp, Artificial Sequence
  Synthetic oligonucleotide
gatcggcgtttggtgcaccgtgacttg

SEQ ID NO: 1025 - DNA, 27 bp, Artificial Sequence
  Synthetic oligonucleotide
gcgtttggtgcaccgtgacttggcagc

SEQ ID NO: 1026 - DNA, 27 bp, Artificial Sequence
  Synthetic oligonucleotide
ttgggctggccaaactgcttggtgctg

SEQ ID NO: 1027 - DNA, 27 bp, Artificial Sequence
  Synthetic oligonucleotide
tgggctggccaaactgcttggtgctga

SEQ ID NO: 1028 - DNA, 27 bp, Artificial Sequence
  Synthetic oligonucleotide
ggctggccaaactgcttggtgctgaag

SEQ ID NO: 1029 - DNA, 27 bp, Artificial Sequence
  Synthetic oligonucleotide
gctggccaaactgcttggtgctgaaga

SEQ ID NO: 1030 - DNA, 27 bp, Artificial Sequence
  Synthetic oligonucleotide
gtcaagtgctggatgatagatgctgat

SEQ ID NO: 1031 - DNA, 27 bp, Artificial Sequence
  Synthetic oligonucleotide
tcaagtgctggatgatagatgctgata

SEQ ID NO: 1032 - DNA, 27 bp, Artificial Sequence
  Synthetic oligonucleotide
caagtgctggatgatagatgctgatag

SEQ ID NO: 1033 - DNA, 27 bp, Artificial Sequence
  Synthetic oligonucleotide
aagtgctggatgatagatgctgatagc

SEQ ID NO: 1034 - DNA, 27 bp, Artificial Sequence
  Synthetic oligonucleotide
agtgctggatgatagatgctgatagcc

SEQ ID NO: 1035 - DNA, 27 bp, Artificial Sequence
  Synthetic oligonucleotide
gtgctggatgatagatgctgatagccg

SEQ ID NO: 1036 - DNA, 27 bp, Artificial Sequence
  Synthetic oligonucleotide
tgctggatgatagatgctgatagccgc

SEQ ID NO: 1037 - DNA, 27 bp, Artificial Sequence
  Synthetic oligonucleotide
gctggatgatagatgctgatagccgcc

SEQ ID NO: 1038 - DNA, 27 bp, Artificial Sequence
  Synthetic oligonucleotide
ctggatgatagatgctgatagccgccc

SEQ ID NO: 1039 - DNA, 27 bp, Artificial Sequence
  Synthetic oligonucleotide
tggatgatagatgctgatagccgccca

SEQ ID NO: 1040 - DNA, 27 bp, Artificial Sequence
  Synthetic oligonucleotide
atgatagatgctgatagccgcccaaag

SEQ ID NO: 1041 - DNA, 27 bp, Artificial Sequence
  Synthetic oligonucleotide
gatagatgctgatagccgcccaaagtt

SEQ ID NO: 1042 - DNA, 27 bp, Artificial Sequence
  Synthetic oligonucleotide
gagctgccgtgtcaaagaagacgcctt

SEQ ID NO: 1043 - DNA, 27 bp, Artificial Sequence
  Synthetic oligonucleotide
agctgccgtgtcaaagaagacgccttc

SEQ ID NO: 1044 - DNA, 27 bp, Artificial Sequence
  Synthetic oligonucleotide
aagacgccttcttgcagcggtacagct

SEQ ID NO: 1045 - DNA, 27 bp, Artificial Sequence
  Synthetic oligonucleotide
agacgccttcttgcagcggtacagctc

SEQ ID NO: 1046 - DNA, 27 bp, Artificial Sequence
  Synthetic oligonucleotide
gacgccttcttgcagcggtacagctcc

SEQ ID NO: 1047 - DNA, 27 bp, Artificial Sequence
  Synthetic oligonucleotide
acgccttcttgcagcggtacagctccg

SEQ ID NO: 1048 - DNA, 27 bp, Artificial Sequence
  Synthetic oligonucleotide
cgccttcttgcagcggtacagctccga

SEQ ID NO: 1049 - DNA, 27 bp, Artificial Sequence
  Synthetic oligonucleotide
gccttcttgcagcggtacagctccgac

SEQ ID NO: 1050 - DNA, 27 bp, Artificial Sequence
  Synthetic oligonucleotide
ccttcttgcagcggtacagctccgacc

SEQ ID NO: 1051 - DNA, 27 bp, Artificial Sequence
  Synthetic oligonucleotide
gactggctttaaagcataactctgatg

SEQ ID NO: 1052 - DNA, 27 bp, Artificial Sequence
  Synthetic oligonucleotide
aagtgggcctctctcctgatgcacttt

SEQ ID NO: 1053 - DNA, 27 bp, Artificial Sequence
  Synthetic oligonucleotide
agtgggcctctctcctgatgcactttg

SEQ ID NO: 1054 - DNA, 27 bp, Artificial Sequence
  Synthetic oligonucleotide
gtgggcctctctcctgatgcactttgg

SEQ ID NO: 1055 - DNA, 27 bp, Artificial Sequence
  Synthetic oligonucleotide
tgggcctctctcctgatgcactttggg

SEQ ID NO: 1056 - DNA, 27 bp, Artificial Sequence
  Synthetic oligonucleotide
gcctctctcctgatgcactttgggaag

SEQ ID NO: 1057 - DNA, 27 bp, Artificial Sequence
  Synthetic oligonucleotide
gattgatgcactcttgtagtctggtac

SEQ ID NO: 1058 - DNA, 27 bp, Artificial Sequence
  Synthetic oligonucleotide
tagacttccttctatgttttctgtttc

SEQ ID NO: 1059 - DNA, 27 bp, Artificial Sequence
  Synthetic oligonucleotide
cttctatgttttctgtttcattgtttt

SEQ ID NO: 1060 - DNA, 27 bp, Artificial Sequence
  Synthetic oligonucleotide
tatgtttttcttcctggtaaactgcag

SEQ ID NO: 1061 - DNA, 27 bp, Artificial Sequence
  Synthetic oligonucleotide
atgtttttcttcctggtaaactgcagc

SEQ ID NO: 1062 - DNA, 27 bp, Artificial Sequence
  Synthetic oligonucleotide
tgtttttcttcctggtaaactgcagcc

SEQ ID NO: 1063 - DNA, 27 bp, Artificial Sequence
  Synthetic oligonucleotide
tttcttcctggtaaactgcagccaaac

SEQ ID NO: 1064 - DNA, 27 bp, Artificial Sequence
  Synthetic oligonucleotide
ttcgatcttcctaatgctgtgaccctt

SEQ ID NO: 1065 - DNA, 27 bp, Artificial Sequence
  Synthetic oligonucleotide
tcgatcttcctaatgctgtgacccttt

SEQ ID NO: 1066 - DNA, 27 bp, Artificial Sequence
  Synthetic oligonucleotide
ttgttgctacttcataactgtaaattt

SEQ ID NO: 1067 - DNA, 27 bp, Artificial Sequence
  Synthetic oligonucleotide
gcttgcagcatcctctggtttcctaac

SEQ ID NO: 1068 - DNA, 27 bp, Artificial Sequence
  Synthetic oligonucleotide
cgttgcaagccactctaactgtagcaa

SEQ ID NO: 1069 - RNA, 25 nt, Artificial Sequence
  Synthetic oligonucleotide
cgcagcgcggccgcagcagccuccg

SEQ ID NO: 1070 - RNA, 25 nt, Artificial Sequence
  Synthetic oligonucleotide
gcagcgcggccgcagcagccuccgc

SEQ ID NO: 1071 - RNA, 25 nt, Artificial Sequence
  Synthetic oligonucleotide
agcgcggccgcagcagccuccgccc

SEQ ID NO: 1072 - RNA, 25 nt, Artificial Sequence
  Synthetic oligonucleotide
gcgcuccuggcgcugcuggcugcgc

SEQ ID NO: 1073 - RNA, 25 nt, Artificial Sequence
  Synthetic oligonucleotide
gcuccuggcgcugcuggcugcgcuc

SEQ ID NO: 1074 - RNA, 25 nt, Artificial Sequence
  Synthetic oligonucleotide
uccuggcgcugcuggcugcgcucug

SEQ ID NO: 1075 - RNA, 25 nt, Artificial Sequence
  Synthetic oligonucleotide
guugggcacuuuugaagaucauuuu

SEQ ID NO: 1076 - RNA, 25 nt, Artificial Sequence
  Synthetic oligonucleotide
ggaauuuggaaauuaccuaugugca

SEQ ID NO: 1077 - RNA, 25 nt, Artificial Sequence
  Synthetic oligonucleotide
uuaugaucuuuccuucuuaaagacc

SEQ ID NO: 1078 - RNA, 25 nt, Artificial Sequence
  Synthetic oligonucleotide
ggcugguuauguccucauugcccuc

SEQ ID NO: 1079 - RNA, 25 nt, Artificial Sequence
  Synthetic oligonucleotide
cccaugagaaauuuacaggaaaucc

SEQ ID NO: 1080 - RNA, 25 nt, Artificial Sequence
  Synthetic oligonucleotide
ugcauggcgccgugcgguucagcaa

SEQ ID NO: 1081 - RNA, 25 nt, Artificial Sequence
  Synthetic oligonucleotide
gcgccgugcgguucagcaacaaccc

SEQ ID NO: 1082 - RNA, 25 nt, Artificial Sequence
  Synthetic oligonucleotide
gcgccgugcgguucagcaacaaccc

SEQ ID NO: 1083 - RNA, 25 nt, Artificial Sequence
  Synthetic oligonucleotide
gccgugcgguucagcaacaacccug

SEQ ID NO: 1084 - RNA, 25 nt, Artificial Sequence
  Synthetic oligonucleotide
ccgugcgguucagcaacaacccugc

SEQ ID NO: 1085 - RNA, 25 nt, Artificial Sequence
  Synthetic oligonucleotide
gcugccaaaagugugauccaagcug

SEQ ID NO: 1086 - RNA, 25 nt, Artificial Sequence
  Synthetic oligonucleotide
cugugcccagcagugcuccgggcgc

SEQ ID NO: 1087 - RNA, 25 nt, Artificial Sequence
  Synthetic oligonucleotide
gugcccagcagugcuccgggcgcug

SEQ ID NO: 1088 - RNA, 25 nt, Artificial Sequence
  Synthetic oligonucleotide
gcuccgggcgcugccguggcaaguc

SEQ ID NO: 1089 - RNA, 25 nt, Artificial Sequence
  Synthetic oligonucleotide
gagcgacugccuggucugccgcaaa

SEQ ID NO: 1090 - RNA, 25 nt, Artificial Sequence
  Synthetic oligonucleotide
gccuggucugccgcaaauuccgaga

SEQ ID NO: 1091 - RNA, 25 nt, Artificial Sequence
  Synthetic oligonucleotide
cagaucacggcucgugcguccgagc

SEQ ID NO: 1092 - RNA, 25 nt, Artificial Sequence
  Synthetic oligonucleotide
gcaaaguguguaacggaauagguau

SEQ ID NO: 1093 - RNA, 25 nt, Artificial Sequence
  Synthetic oligonucleotide
gaauagguauuggugaauuuaaaga

SEQ ID NO: 1094 - RNA, 25 nt, Artificial Sequence
  Synthetic oligonucleotide
acgaauauuaaacacuucaaaaacu

SEQ ID NO: 1095 - RNA, 25 nt, Artificial Sequence
  Synthetic oligonucleotide
acaggaacuggauauucugaaaacc

SEQ ID NO: 1096 - RNA, 25 nt, Artificial Sequence
  Synthetic oligonucleotide
caggguuuuugcugauucaggcuug

SEQ ID NO: 1097 - RNA, 25 nt, Artificial Sequence
  Synthetic oligonucleotide
caggaaacaaaaauuugugcuaugc

SEQ ID NO: 1098 - RNA, 25 nt, Artificial Sequence
  Synthetic oligonucleotide
gcuaugcaaauacaauaaacuggaa

SEQ ID NO: 1099 - RNA, 25 nt, Artificial Sequence
  Synthetic oligonucleotide
ggucagaaaaccaaaauuauaagca

SEQ ID NO: 1100 - RNA, 25 nt, Artificial Sequence
  Synthetic oligonucleotide
gcgucucuugccggaaugucagccg

SEQ ID NO: 1101 - RNA, 25 nt, Artificial Sequence
  Synthetic oligonucleotide
gcccuccucuugcugcugguggugg

SEQ ID NO: 1102 - RNA, 25 nt, Artificial Sequence
  Synthetic oligonucleotide
cccuccucuugcugcuggugguggc

SEQ ID NO: 1103 - RNA, 25 nt, Artificial Sequence
  Synthetic oligonucleotide
ccucuugcugcuggugguggcccug

SEQ ID NO: 1104 - RNA, 25 nt, Artificial Sequence
  Synthetic oligonucleotide
cucuugcugcuggugguggcccugg

SEQ ID NO: 1105 - RNA, 25 nt, Artificial Sequence
  Synthetic oligonucleotide
gaagcgcacgcugcggaggcugcug

SEQ ID NO: 1106 - RNA, 25 nt, Artificial Sequence
  Synthetic oligonucleotide
gcgcacgcugcggaggcugcugcag

SEQ ID NO: 1107 - RNA, 25 nt, Artificial Sequence
  Synthetic oligonucleotide
cugaauucaaaaagaucaaagugcu

SEQ ID NO: 1108 - RNA, 25 nt, Artificial Sequence
  Synthetic oligonucleotide
aagugcugggcuccggugcguucgg

SEQ ID NO: 1109 - RNA, 25 nt, Artificial Sequence
  Synthetic oligonucleotide
gugcugggcuccggugcguucggca

SEQ ID NO: 1110 - RNA, 25 nt, Artificial Sequence
  Synthetic oligonucleotide
ugcugggcuccggugcguucggcac

SEQ ID NO: 1111 - RNA, 25 nt, Artificial Sequence
  Synthetic oligonucleotide
gcugggcuccggugcguucggcacg

SEQ ID NO: 1112 - RNA, 25 nt, Artificial Sequence
  Synthetic oligonucleotide
cugggcuccggugcguucggcacgg

SEQ ID NO: 1113 - RNA, 25 nt, Artificial Sequence
  Synthetic oligonucleotide
ugugccgccugcugggcaucugccu

SEQ ID NO: 1114 - RNA, 25 nt, Artificial Sequence
  Synthetic oligonucleotide
gugccgccugcugggcaucugccuc

SEQ ID NO: 1115 - RNA, 25 nt, Artificial Sequence
  Synthetic oligonucleotide
gccgccugcugggcaucugccucac

SEQ ID NO: 1116 - RNA, 25 nt, Artificial Sequence
  Synthetic oligonucleotide
ccgugcagcucaucacgcagcucau

SEQ ID NO: 1117 - RNA, 25 nt, Artificial Sequence
  Synthetic oligonucleotide
ugcagcucaucacgcagcucaugcc

SEQ ID NO: 1118 - RNA, 25 nt, Artificial Sequence
  Synthetic oligonucleotide
gcucaucacgcagcucaugcccuuc

SEQ ID NO: 1119 - RNA, 25 nt, Artificial Sequence
  Synthetic oligonucleotide
cucaucacgcagcucaugcccuucg

SEQ ID NO: 1120 - RNA, 25 nt, Artificial Sequence
  Synthetic oligonucleotide
gcucaugcccuucggcugccuccug

SEQ ID NO: 1121 - RNA, 25 nt, Artificial Sequence
  Synthetic oligonucleotide
cucaugcccuucggcugccuccugg

SEQ ID NO: 1122 - RNA, 25 nt, Artificial Sequence
  Synthetic oligonucleotide
ggaggaccgucgcuuggugcaccgc

SEQ ID NO: 1123 - RNA, 25 nt, Artificial Sequence
  Synthetic oligonucleotide
aggaccgucgcuuggugcaccgcga

SEQ ID NO: 1124 - RNA, 25 nt, Artificial Sequence
  Synthetic oligonucleotide
ggaccgucgcuuggugcaccgcgac

SEQ ID NO: 1125 - RNA, 25 nt, Artificial Sequence
  Synthetic oligonucleotide
gaccgucgcuuggugcaccgcgacc

SEQ ID NO: 1126 - RNA, 25 nt, Artificial Sequence
  Synthetic oligonucleotide
ccgucgcuuggugcaccgcgaccug

SEQ ID NO: 1127 - RNA, 25 nt, Artificial Sequence
  Synthetic oligonucleotide
gucgcuuggugcaccgcgaccuggc

SEQ ID NO: 1128 - RNA, 25 nt, Artificial Sequence
  Synthetic oligonucleotide
cgcuuggugcaccgcgaccuggcag

SEQ ID NO: 1129 - RNA, 25 nt, Artificial Sequence
  Synthetic oligonucleotide
gcuuggugcaccgcgaccuggcagc

SEQ ID NO: 1130 - RNA, 25 nt, Artificial Sequence
  Synthetic oligonucleotide
uuggugcaccgcgaccuggcagcca

SEQ ID NO: 1131 - RNA, 25 nt, Artificial Sequence
  Synthetic oligonucleotide
cauuggaaucaauuuuacacagaau

SEQ ID NO: 1132 - RNA, 25 nt, Artificial Sequence
  Synthetic oligonucleotide
aagugcuggaugauagacgcagaua

SEQ ID NO: 1133 - RNA, 25 nt, Artificial Sequence
  Synthetic oligonucleotide
gugcuggaugauagacgcagauagu

SEQ ID NO: 1134 - RNA, 25 nt, Artificial Sequence
  Synthetic oligonucleotide
ugcuggaugauagacgcagauaguc

SEQ ID NO: 1135 - RNA, 25 nt, Artificial Sequence
  Synthetic oligonucleotide
cuggaugauagacgcagauagucgc

SEQ ID NO: 1136 - RNA, 25 nt, Artificial Sequence
  Synthetic oligonucleotide
ccugagcucucugagugcaaccagc

SEQ ID NO: 1137 - RNA, 25 nt, Artificial Sequence
  Synthetic oligonucleotide
gagcucucugagugcaaccagcaac

SEQ ID NO: 1138 - RNA, 25 nt, Artificial Sequence
  Synthetic oligonucleotide
gcugucccaucaaggaagacagcuu

SEQ ID NO: 1139 - RNA, 25 nt, Artificial Sequence
  Synthetic oligonucleotide
cugucccaucaaggaagacagcuuc

SEQ ID NO: 1140 - RNA, 25 nt, Artificial Sequence
  Synthetic oligonucleotide
gacagcuucuugcagcgauacagcu

SEQ ID NO: 1141 - RNA, 25 nt, Artificial Sequence
  Synthetic oligonucleotide
acagcuucuugcagcgauacagcuc

SEQ ID NO: 1142 - RNA, 25 nt, Artificial Sequence
  Synthetic oligonucleotide
cagcuucuugcagcgauacagcuca

SEQ ID NO: 1143 - RNA, 25 nt, Artificial Sequence
  Synthetic oligonucleotide
agcuucuugcagcgauacagcucag

SEQ ID NO: 1144 - RNA, 25 nt, Artificial Sequence
  Synthetic oligonucleotide
gcuucuugcagcgauacagcucaga

SEQ ID NO: 1145 - RNA, 25 nt, Artificial Sequence
  Synthetic oligonucleotide
uucuugcagcgauacagcucagacc

SEQ ID NO: 1146 - RNA, 25 nt, Artificial Sequence
  Synthetic oligonucleotide
acaaagcagugaauuuauuggagca

SEQ ID NO: 1147 - RNA, 25 nt, Artificial Sequence
  Synthetic oligonucleotide
auauuugaaaaaaaaaaaaaguaua

SEQ ID NO: 1148 - RNA, 25 nt, Artificial Sequence
  Synthetic oligonucleotide
ugaggauuuuuauugauuggggauc

SEQ ID NO: 1149 - RNA, 25 nt, Artificial Sequence
  Synthetic oligonucleotide
cuauugauuuuuacuucaaugggcu

SEQ ID NO: 1150 - RNA, 25 nt, Artificial Sequence
  Synthetic oligonucleotide
ggaagaagcuugcugguagcacuug

SEQ ID NO: 1151 - RNA, 25 nt, Artificial Sequence
  Synthetic oligonucleotide
gaagaagcuugcugguagcacuugc

SEQ ID NO: 1152 - RNA, 25 nt, Artificial Sequence
  Synthetic oligonucleotide
aagaagcuugcugguagcacuugcu

SEQ ID NO: 1153 - RNA, 25 nt, Artificial Sequence
  Synthetic oligonucleotide
agaagcuugcugguagcacuugcua

SEQ ID NO: 1154 - RNA, 25 nt, Artificial Sequence
  Synthetic oligonucleotide
gaagcuugcugguagcacuugcuac

SEQ ID NO: 1155 - RNA, 25 nt, Artificial Sequence
  Synthetic oligonucleotide
agcuugcugguagcacuugcuaccc

SEQ ID NO: 1156 - RNA, 25 nt, Artificial Sequence
  Synthetic oligonucleotide
gcuugcugguagcacuugcuacccu

SEQ ID NO: 1157 - RNA, 25 nt, Artificial Sequence
  Synthetic oligonucleotide
cuugcugguagcacuugcuacccug

SEQ ID NO: 1158 - RNA, 25 nt, Artificial Sequence
  Synthetic oligonucleotide
uugcugguagcacuugcuacccuga

SEQ ID NO: 1159 - RNA, 25 nt, Artificial Sequence
  Synthetic oligonucleotide
ugcugguagcacuugcuacccugag

SEQ ID NO: 1160 - RNA, 25 nt, Artificial Sequence
  Synthetic oligonucleotide
gcugguagcacuugcuacccugagu

SEQ ID NO: 1161 - RNA, 25 nt, Artificial Sequence
  Synthetic oligonucleotide
augcuugauuccagugguucugcuu

SEQ ID NO: 1162 - RNA, 25 nt, Artificial Sequence
  Synthetic oligonucleotide
ugcuugauuccagugguucugcuuc

SEQ ID NO: 1163 - RNA, 25 nt, Artificial Sequence
  Synthetic oligonucleotide
caggccggaucgguacuguaucaag

SEQ ID NO: 1164 - RNA, 25 nt, Artificial Sequence
  Synthetic oligonucleotide
cggaucgguacuguaucaagucaug

SEQ ID NO: 1165 - RNA, 25 nt, Artificial Sequence
  Synthetic oligonucleotide
cuuagacuuacuuuuguaaaaaugu

SEQ ID NO: 1166 - RNA, 25 nt, Artificial Sequence
  Synthetic oligonucleotide
gucuugcugucaugaaaucagcaag

SEQ ID NO: 1167 - RNA, 25 nt, Artificial Sequence
  Synthetic oligonucleotide
uaaggauagcaccgcuuuuguucuc

SEQ ID NO: 1168 - RNA, 25 nt, Artificial Sequence
  Synthetic oligonucleotide
aggauagcaccgcuuuuguucucgc

SEQ ID NO: 1169 - RNA, 25 nt, Artificial Sequence
  Synthetic oligonucleotide
ggauagcaccgcuuuuguucucgca

SEQ ID NO: 1170 - RNA, 25 nt, Artificial Sequence
  Synthetic oligonucleotide
gauagcaccgcuuuuguucucgcaa

SEQ ID NO: 1171 - RNA, 25 nt, Artificial Sequence
  Synthetic oligonucleotide
auagcaccgcuuuuguucucgcaaa

SEQ ID NO: 1172 - RNA, 25 nt, Artificial Sequence
  Synthetic oligonucleotide
uagcaccgcuuuuguucucgcaaaa

SEQ ID NO: 1173 - RNA, 25 nt, Artificial Sequence
  Synthetic oligonucleotide
agcaccgcuuuuguucucgcaaaaa

SEQ ID NO: 1174 - RNA, 25 nt, Artificial Sequence
  Synthetic oligonucleotide
gcaccgcuuuuguucucgcaaaaac

SEQ ID NO: 1175 - RNA, 25 nt, Artificial Sequence
  Synthetic oligonucleotide
caccgcuuuuguucucgcaaaaacg

SEQ ID NO: 1176 - RNA, 25 nt, Artificial Sequence
  Synthetic oligonucleotide
cgcuuuuguucucgcaaaaacguau

SEQ ID NO: 1177 - RNA, 25 nt, Artificial Sequence
  Synthetic oligonucleotide
gcuuuuguucucgcaaaaacguauc

SEQ ID NO: 1178 - RNA, 25 nt, Artificial Sequence
  Synthetic oligonucleotide
cuuuuguucucgcaaaaacguaucu

SEQ ID NO: 1179 - RNA, 25 nt, Artificial Sequence
  Synthetic oligonucleotide
uuuuguucucgcaaaaacguaucuc

SEQ ID NO: 1180 - RNA, 25 nt, Artificial Sequence
  Synthetic oligonucleotide
uucucgcaaaaacguaucuccuaau

SEQ ID NO: 1181 - RNA, 25 nt, Artificial Sequence
  Synthetic oligonucleotide
aaauuaguuuguguuacuuauggaa

SEQ ID NO: 1182 - RNA, 25 nt, Artificial Sequence
  Synthetic oligonucleotide
uuauggaagauaguuuucuccuuuu

SEQ ID NO: 1183 - RNA, 25 nt, Artificial Sequence
  Synthetic oligonucleotide
ucaaaagcuuuuuacucaaagagua

SEQ ID NO: 1184 - RNA, 25 nt, Artificial Sequence
  Synthetic oligonucleotide
acuaggguuugaaauugauaaugcu

SEQ ID NO: 1185 - RNA, 25 nt, Artificial Sequence
  Synthetic oligonucleotide
uaaaauaauuucucuacaauuggaa

SEQ ID NO: 1186 - RNA, 25 nt, Artificial Sequence
  Synthetic oligonucleotide
cagcaguccuuuguaaacaguguuu

SEQ ID NO: 1187 - RNA, 25 nt, Artificial Sequence
  Synthetic oligonucleotide
caauuuaucaaggaagaaaugguuc

SEQ ID NO: 1188 - RNA, 25 nt, Artificial Sequence
  Synthetic oligonucleotide
uacaaaauguuccuuuugcuuuuaa

SEQ ID NO: 1189 - RNA, 25 nt, Artificial Sequence
  Synthetic oligonucleotide
guuccuuuugcuuuuaaaguaauuu

SEQ ID NO: 1190 - RNA, 25 nt, Artificial Sequence
  Synthetic oligonucleotide
uuccuuuugcuuuuaaaguaauuuu

SEQ ID NO: 1191 - RNA, 25 nt, Artificial Sequence
  Synthetic oligonucleotide
uugcuuuuaaaguaauuuuugacuc

SEQ ID NO: 1192 - RNA, 25 nt, Artificial Sequence
  Synthetic oligonucleotide
guuaagaaaguauuugauuuuuguc

SEQ ID NO: 1193 - RNA, 25 nt, Artificial Sequence
  Synthetic oligonucleotide
uuggaaauuaccuaugugcagagga

SEQ ID NO: 1194 - RNA, 25 nt, Artificial Sequence
  Synthetic oligonucleotide
uggaaauuaccuaugugcagaggaa

SEQ ID NO: 1195 - RNA, 25 nt, Artificial Sequence
  Synthetic oligonucleotide
cuuuccuucuuaaagaccauccagg

SEQ ID NO: 1196 - RNA, 25 nt, Artificial Sequence
  Synthetic oligonucleotide
uuuccuucuuaaagaccauccagga

SEQ ID NO: 1197 - RNA, 25 nt, Artificial Sequence
  Synthetic oligonucleotide
uuccuucuuaaagaccauccaggag

SEQ ID NO: 1198 - RNA, 25 nt, Artificial Sequence
  Synthetic oligonucleotide
uccuucuuaaagaccauccaggagg

SEQ ID NO: 1199 - RNA, 25 nt, Artificial Sequence
  Synthetic oligonucleotide
ccuucuuaaagaccauccaggaggu

SEQ ID NO: 1200 - RNA, 25 nt, Artificial Sequence
  Synthetic oligonucleotide
cuucuuaaagaccauccaggaggug

SEQ ID NO: 1201 - RNA, 25 nt, Artificial Sequence
  Synthetic oligonucleotide
uucuuaaagaccauccaggaggugg

SEQ ID NO: 1202 - RNA, 25 nt, Artificial Sequence
  Synthetic oligonucleotide
ucuuaaagaccauccaggagguggc

SEQ ID NO: 1203 - RNA, 25 nt, Artificial Sequence
  Synthetic oligonucleotide
cuuaaagaccauccaggagguggcu

SEQ ID NO: 1204 - RNA, 25 nt, Artificial Sequence
  Synthetic oligonucleotide
uuaaagaccauccaggagguggcug

SEQ ID NO: 1205 - RNA, 25 nt, Artificial Sequence
  Synthetic oligonucleotide
uaaagaccauccaggagguggcugg

SEQ ID NO: 1206 - RNA, 25 nt, Artificial Sequence
  Synthetic oligonucleotide
aaagaccauccaggagguggcuggu

SEQ ID NO: 1207 - RNA, 25 nt, Artificial Sequence
  Synthetic oligonucleotide
aagaccauccaggagguggcugguu

SEQ ID NO: 1208 - RNA, 25 nt, Artificial Sequence
  Synthetic oligonucleotide
agaccauccaggagguggcugguua

SEQ ID NO: 1209 - RNA, 25 nt, Artificial Sequence
  Synthetic oligonucleotide
ugugauccaagcugucccaauggga

SEQ ID NO: 1210 - RNA, 25 nt, Artificial Sequence
  Synthetic oligonucleotide
gugauccaagcugucccaaugggag

SEQ ID NO: 1211 - RNA, 25 nt, Artificial Sequence
  Synthetic oligonucleotide
ugauccaagcugucccaaugggagc

SEQ ID NO: 1212 - RNA, 25 nt, Artificial Sequence
  Synthetic oligonucleotide
gauccaagcugucccaaugggagcu

SEQ ID NO: 1213 - RNA, 25 nt, Artificial Sequence
  Synthetic oligonucleotide
auccaagcugucccaaugggagcug

SEQ ID NO: 1214 - RNA, 25 nt, Artificial Sequence
  Synthetic oligonucleotide
aggagaggagaacugccagaaacug

SEQ ID NO: 1215 - RNA, 25 nt, Artificial Sequence
  Synthetic oligonucleotide
ggagaggagaacugccagaaacuga

SEQ ID NO: 1216 - RNA, 25 nt, Artificial Sequence
  Synthetic oligonucleotide
gagaggagaacugccagaaacugac

SEQ ID NO: 1217 - RNA, 25 nt, Artificial Sequence
  Synthetic oligonucleotide
agaggagaacugccagaaacugacc

SEQ ID NO: 1218 - RNA, 25 nt, Artificial Sequence
  Synthetic oligonucleotide
ugaccaaaaucaucugugcccagca

SEQ ID NO: 1219 - RNA, 25 nt, Artificial Sequence
  Synthetic oligonucleotide
gaccaaaaucaucugugcccagcag

SEQ ID NO: 1220 - RNA, 25 nt, Artificial Sequence
  Synthetic oligonucleotide
accaaaaucaucugugcccagcagu

SEQ ID NO: 1221 - RNA, 25 nt, Artificial Sequence
  Synthetic oligonucleotide
ccaaaaucaucugugcccagcagug

SEQ ID NO: 1222 - RNA, 25 nt, Artificial Sequence
  Synthetic oligonucleotide
caaaaucaucugugcccagcagugc

SEQ ID NO: 1223 - RNA, 25 nt, Artificial Sequence
  Synthetic oligonucleotide
aaaaucaucugugcccagcagugcu

SEQ ID NO: 1224 - RNA, 25 nt, Artificial Sequence
  Synthetic oligonucleotide
aaaucaucugugcccagcagugcuc

SEQ ID NO: 1225 - RNA, 25 nt, Artificial Sequence
  Synthetic oligonucleotide
cagugacugcugccacaaccagugu

SEQ ID NO: 1226 - RNA, 25 nt, Artificial Sequence
  Synthetic oligonucleotide
agugacugcugccacaaccagugug

SEQ ID NO: 1227 - RNA, 25 nt, Artificial Sequence
  Synthetic oligonucleotide
gugacugcugccacaaccagugugc

SEQ ID NO: 1228 - RNA, 25 nt, Artificial Sequence
  Synthetic oligonucleotide
cacucuccauaaaugcuacgaauau

SEQ ID NO: 1229 - RNA, 25 nt, Artificial Sequence
  Synthetic oligonucleotide
uuuuugcugauucaggcuuggccug

SEQ ID NO: 1230 - RNA, 25 nt, Artificial Sequence
  Synthetic oligonucleotide
uuuugcugauucaggcuuggccuga

SEQ ID NO: 1231 - RNA, 25 nt, Artificial Sequence
  Synthetic oligonucleotide
uuugcugauucaggcuuggccugaa

SEQ ID NO: 1232 - RNA, 25 nt, Artificial Sequence
  Synthetic oligonucleotide
uugcugauucaggcuuggccugaaa

SEQ ID NO: 1233 - RNA, 25 nt, Artificial Sequence
  Synthetic oligonucleotide
ugcugauucaggcuuggccugaaaa

SEQ ID NO: 1234 - RNA, 25 nt, Artificial Sequence
  Synthetic oligonucleotide
gcugauucaggcuuggccugaaaac

SEQ ID NO: 1235 - RNA, 25 nt, Artificial Sequence
  Synthetic oligonucleotide
cugauucaggcuuggccugaaaaca

SEQ ID NO: 1236 - RNA, 25 nt, Artificial Sequence
  Synthetic oligonucleotide
ugauucaggcuuggccugaaaacag

SEQ ID NO: 1237 - RNA, 25 nt, Artificial Sequence
  Synthetic oligonucleotide
aagcaacauggucaguuuucucuug

SEQ ID NO: 1238 - RNA, 25 nt, Artificial Sequence
  Synthetic oligonucleotide
agcaacauggucaguuuucucuugc

SEQ ID NO: 1239 - RNA, 25 nt, Artificial Sequence
  Synthetic oligonucleotide
gcaacauggucaguuuucucuugca

SEQ ID NO: 1240 - RNA, 25 nt, Artificial Sequence
  Synthetic oligonucleotide
caauaaacuggaaaaaacuguuugg

SEQ ID NO: 1241 - RNA, 25 nt, Artificial Sequence
  Synthetic oligonucleotide
caggccaugaacaucaccugcacag

SEQ ID NO: 1242 - RNA, 25 nt, Artificial Sequence
  Synthetic oligonucleotide
aggccaugaacaucaccugcacagg

SEQ ID NO: 1243 - RNA, 25 nt, Artificial Sequence
  Synthetic oligonucleotide
auccagugugcccacuacauugacg

SEQ ID NO: 1244 - RNA, 25 nt, Artificial Sequence
  Synthetic oligonucleotide
uccagugugcccacuacauugacgg

SEQ ID NO: 1245 - RNA, 25 nt, Artificial Sequence
  Synthetic oligonucleotide
ccagugugcccacuacauugacggc

SEQ ID NO: 1246 - RNA, 25 nt, Artificial Sequence
  Synthetic oligonucleotide
cagugugcccacuacauugacggcc

SEQ ID NO: 1247 - RNA, 25 nt, Artificial Sequence
  Synthetic oligonucleotide
agugugcccacuacauugacggccc

SEQ ID NO: 1248 - RNA, 25 nt, Artificial Sequence
  Synthetic oligonucleotide
gaauucaaaaagaucaaagugcugg

SEQ ID NO: 1249 - RNA, 25 nt, Artificial Sequence
  Synthetic oligonucleotide
aauucaaaaagaucaaagugcuggg

SEQ ID NO: 1250 - RNA, 25 nt, Artificial Sequence
  Synthetic oligonucleotide
cucuggaucccagaaggugagaaag

SEQ ID NO: 1251 - RNA, 25 nt, Artificial Sequence
  Synthetic oligonucleotide
ucuggaucccagaaggugagaaagu

SEQ ID NO: 1252 - RNA, 25 nt, Artificial Sequence
  Synthetic oligonucleotide
cuggaucccagaaggugagaaaguu

SEQ ID NO: 1253 - RNA, 25 nt, Artificial Sequence
  Synthetic oligonucleotide
uggaucccagaaggugagaaaguua

SEQ ID NO: 1254 - RNA, 25 nt, Artificial Sequence
  Synthetic oligonucleotide
ggaucccagaaggugagaaaguuaa

SEQ ID NO: 1255 - RNA, 25 nt, Artificial Sequence
  Synthetic oligonucleotide
gaucccagaaggugagaaaguuaaa

SEQ ID NO: 1256 - RNA, 25 nt, Artificial Sequence
  Synthetic oligonucleotide
aucccagaaggugagaaaguuaaaa

SEQ ID NO: 1257 - RNA, 25 nt, Artificial Sequence
  Synthetic oligonucleotide
ucccagaaggugagaaaguuaaaau

SEQ ID NO: 1258 - RNA, 25 nt, Artificial Sequence
  Synthetic oligonucleotide
cagcaugucaagaucacagauuuug

SEQ ID NO: 1259 - RNA, 25 nt, Artificial Sequence
  Synthetic oligonucleotide
agcaugucaagaucacagauuuugg

SEQ ID NO: 1260 - RNA, 25 nt, Artificial Sequence
  Synthetic oligonucleotide
gcaugucaagaucacagauuuuggg

SEQ ID NO: 1261 - RNA, 25 nt, Artificial Sequence
  Synthetic oligonucleotide
caugucaagaucacagauuuugggc

SEQ ID NO: 1262 - RNA, 25 nt, Artificial Sequence
  Synthetic oligonucleotide
augucaagaucacagauuuugggcu

SEQ ID NO: 1263 - RNA, 25 nt, Artificial Sequence
  Synthetic oligonucleotide
ugucaagaucacagauuuugggcug

SEQ ID NO: 1264 - RNA, 25 nt, Artificial Sequence
  Synthetic oligonucleotide
gucaagaucacagauuuugggcugg

SEQ ID NO: 1265 - RNA, 25 nt, Artificial Sequence
  Synthetic oligonucleotide
ucaagaucacagauuuugggcuggc

SEQ ID NO: 1266 - RNA, 25 nt, Artificial Sequence
  Synthetic oligonucleotide
caagaucacagauuuugggcuggcc

SEQ ID NO: 1267 - RNA, 25 nt, Artificial Sequence
  Synthetic oligonucleotide
aagaucacagauuuugggcuggcca

SEQ ID NO: 1268 - RNA, 25 nt, Artificial Sequence
  Synthetic oligonucleotide
agaucacagauuuugggcuggccaa

SEQ ID NO: 1269 - RNA, 25 nt, Artificial Sequence
  Synthetic oligonucleotide
gaucacagauuuugggcuggccaaa

SEQ ID NO: 1270 - RNA, 25 nt, Artificial Sequence
  Synthetic oligonucleotide
aucacagauuuugggcuggccaaac

SEQ ID NO: 1271 - RNA, 25 nt, Artificial Sequence
  Synthetic oligonucleotide
ucacagauuuugggcuggccaaacu

SEQ ID NO: 1272 - RNA, 25 nt, Artificial Sequence
  Synthetic oligonucleotide
cacagauuuugggcuggccaaacug

SEQ ID NO: 1273 - RNA, 25 nt, Artificial Sequence
  Synthetic oligonucleotide
acagauuuugggcuggccaaacugc

SEQ ID NO: 1274 - RNA, 25 nt, Artificial Sequence
  Synthetic oligonucleotide
cagauuuugggcuggccaaacugcu

SEQ ID NO: 1275 - RNA, 25 nt, Artificial Sequence
  Synthetic oligonucleotide
agauuuugggcuggccaaacugcug

SEQ ID NO: 1276 - RNA, 25 nt, Artificial Sequence
  Synthetic oligonucleotide
gauuuugggcuggccaaacugcugg

SEQ ID NO: 1277 - RNA, 25 nt, Artificial Sequence
  Synthetic oligonucleotide
auuuugggcuggccaaacugcuggg

SEQ ID NO: 1278 - RNA, 25 nt, Artificial Sequence
  Synthetic oligonucleotide
uuuugggcuggccaaacugcugggu

SEQ ID NO: 1279 - RNA, 25 nt, Artificial Sequence
  Synthetic oligonucleotide
uuugggcuggccaaacugcugggug

SEQ ID NO: 1280 - RNA, 25 nt, Artificial Sequence
  Synthetic oligonucleotide
uugggcuggccaaacugcugggugc

SEQ ID NO: 1281 - RNA, 25 nt, Artificial Sequence
  Synthetic oligonucleotide
gcaaagugccuaucaaguggauggc

SEQ ID NO: 1282 - RNA, 25 nt, Artificial Sequence
  Synthetic oligonucleotide
caaagugccuaucaaguggauggca

SEQ ID NO: 1283 - RNA, 25 nt, Artificial Sequence
  Synthetic oligonucleotide
aaagugccuaucaaguggauggcau

SEQ ID NO: 1284 - RNA, 25 nt, Artificial Sequence
  Synthetic oligonucleotide
aagugccuaucaaguggauggcauu

SEQ ID NO: 1285 - RNA, 25 nt, Artificial Sequence
  Synthetic oligonucleotide
agugccuaucaaguggauggcauug

SEQ ID NO: 1286 - RNA, 25 nt, Artificial Sequence
  Synthetic oligonucleotide
gugccuaucaaguggauggcauugg

SEQ ID NO: 1287 - RNA, 25 nt, Artificial Sequence
  Synthetic oligonucleotide
ugccuaucaaguggauggcauugga

SEQ ID NO: 1288 - RNA, 25 nt, Artificial Sequence
  Synthetic oligonucleotide
accaucgaugucuacaugaucaugg

SEQ ID NO: 1289 - RNA, 25 nt, Artificial Sequence
  Synthetic oligonucleotide
ccaucgaugucuacaugaucauggu

SEQ ID NO: 1290 - RNA, 25 nt, Artificial Sequence
  Synthetic oligonucleotide
caucgaugucuacaugaucaugguc

SEQ ID NO: 1291 - RNA, 25 nt, Artificial Sequence
  Synthetic oligonucleotide
aucgaugucuacaugaucaugguca

SEQ ID NO: 1292 - RNA, 25 nt, Artificial Sequence
  Synthetic oligonucleotide
ucgaugucuacaugaucauggucaa

SEQ ID NO: 1293 - RNA, 25 nt, Artificial Sequence
  Synthetic oligonucleotide
cgaugucuacaugaucauggucaag

SEQ ID NO: 1294 - RNA, 25 nt, Artificial Sequence
  Synthetic oligonucleotide
gaugucuacaugaucauggucaagu

SEQ ID NO: 1295 - RNA, 25 nt, Artificial Sequence
  Synthetic oligonucleotide
augucuacaugaucauggucaagug

SEQ ID NO: 1296 - RNA, 25 nt, Artificial Sequence
  Synthetic oligonucleotide
ugucuacaugaucauggucaagugc

SEQ ID NO: 1297 - RNA, 25 nt, Artificial Sequence
  Synthetic oligonucleotide
gucuacaugaucauggucaagugcu

SEQ ID NO: 1298 - RNA, 25 nt, Artificial Sequence
  Synthetic oligonucleotide
ucuacaugaucauggucaagugcug

SEQ ID NO: 1299 - RNA, 25 nt, Artificial Sequence
  Synthetic oligonucleotide
cuacaugaucauggucaagugcugg

SEQ ID NO: 1300 - RNA, 25 nt, Artificial Sequence
  Synthetic oligonucleotide
uacaugaucauggucaagugcugga

SEQ ID NO: 1301 - RNA, 25 nt, Artificial Sequence
  Synthetic oligonucleotide
acaugaucauggucaagugcuggau

SEQ ID NO: 1302 - RNA, 25 nt, Artificial Sequence
  Synthetic oligonucleotide
caugaucauggucaagugcuggaug

SEQ ID NO: 1303 - RNA, 25 nt, Artificial Sequence
  Synthetic oligonucleotide
augaucauggucaagugcuggauga

SEQ ID NO: 1304 - RNA, 25 nt, Artificial Sequence
  Synthetic oligonucleotide
ugaucauggucaagugcuggaugau

SEQ ID NO: 1305 - RNA, 25 nt, Artificial Sequence
  Synthetic oligonucleotide
gaucauggucaagugcuggaugaua

SEQ ID NO: 1306 - RNA, 25 nt, Artificial Sequence
  Synthetic oligonucleotide
aucauggucaagugcuggaugauag

SEQ ID NO: 1307 - RNA, 25 nt, Artificial Sequence
  Synthetic oligonucleotide
ucauggucaagugcuggaugauaga

SEQ ID NO: 1308 - RNA, 25 nt, Artificial Sequence
  Synthetic oligonucleotide
cauggucaagugcuggaugauagac

SEQ ID NO: 1309 - RNA, 25 nt, Artificial Sequence
  Synthetic oligonucleotide
auggucaagugcuggaugauagacg

SEQ ID NO: 1310 - RNA, 25 nt, Artificial Sequence
  Synthetic oligonucleotide
uggucaagugcuggaugauagacgc

SEQ ID NO: 1311 - RNA, 25 nt, Artificial Sequence
  Synthetic oligonucleotide
ggucaagugcuggaugauagacgca

SEQ ID NO: 1312 - RNA, 25 nt, Artificial Sequence
  Synthetic oligonucleotide
gucaagugcuggaugauagacgcag

SEQ ID NO: 1313 - RNA, 25 nt, Artificial Sequence
  Synthetic oligonucleotide
ucaagugcuggaugauagacgcaga

SEQ ID NO: 1314 - RNA, 25 nt, Artificial Sequence
  Synthetic oligonucleotide
gaauucuccaaaauggcccgagacc

SEQ ID NO: 1315 - RNA, 25 nt, Artificial Sequence
  Synthetic oligonucleotide
aauucuccaaaauggcccgagaccc

SEQ ID NO: 1316 - RNA, 25 nt, Artificial Sequence
  Synthetic oligonucleotide
gaugaaagaaugcauuugccaaguc

SEQ ID NO: 1317 - RNA, 25 nt, Artificial Sequence
  Synthetic oligonucleotide
augaaagaaugcauuugccaagucc

SEQ ID NO: 1318 - RNA, 25 nt, Artificial Sequence
  Synthetic oligonucleotide
ugaaagaaugcauuugccaaguccu

SEQ ID NO: 1319 - RNA, 25 nt, Artificial Sequence
  Synthetic oligonucleotide
gaaagaaugcauuugccaaguccua

SEQ ID NO: 1320 - RNA, 25 nt, Artificial Sequence
  Synthetic oligonucleotide
aaagaaugcauuugccaaguccuac

SEQ ID NO: 1321 - RNA, 25 nt, Artificial Sequence
  Synthetic oligonucleotide
gacaacccugacuaccagcaggacu

SEQ ID NO: 1322 - RNA, 25 nt, Artificial Sequence
  Synthetic oligonucleotide
acaacccugacuaccagcaggacuu

SEQ ID NO: 1323 - RNA, 25 nt, Artificial Sequence
  Synthetic oligonucleotide
caacccugacuaccagcaggacuuc

SEQ ID NO: 1324 - RNA, 25 nt, Artificial Sequence
  Synthetic oligonucleotide
aacccugacuaccagcaggacuucu

SEQ ID NO: 1325 - RNA, 25 nt, Artificial Sequence
  Synthetic oligonucleotide
acccugacuaccagcaggacuucuu

SEQ ID NO: 1326 - RNA, 25 nt, Artificial Sequence
  Synthetic oligonucleotide
cccugacuaccagcaggacuucuuu

SEQ ID NO: 1327 - RNA, 25 nt, Artificial Sequence
  Synthetic oligonucleotide
ccugacuaccagcaggacuucuuuc

SEQ ID NO: 1328 - RNA, 25 nt, Artificial Sequence
  Synthetic oligonucleotide
cugacuaccagcaggacuucuuucc

SEQ ID NO: 1329 - RNA, 25 nt, Artificial Sequence
  Synthetic oligonucleotide
gcgcaacgcgcagcagccucccucc

SEQ ID NO: 1330 - RNA, 25 nt, Artificial Sequence
  Synthetic oligonucleotide
gcgcagcagccucccuccucuucuu

SEQ ID NO: 1331 - RNA, 25 nt, Artificial Sequence
  Synthetic oligonucleotide
ccucccuccucuucuucccgcacug

SEQ ID NO: 1332 - RNA, 25 nt, Artificial Sequence
  Synthetic oligonucleotide
cccuccucuucuucccgcacugugc

SEQ ID NO: 1333 - RNA, 25 nt, Artificial Sequence
  Synthetic oligonucleotide
cuccucuucuucccgcacugugcgc

SEQ ID NO: 1334 - RNA, 25 nt, Artificial Sequence
  Synthetic oligonucleotide
ccucuucuucccgcacugugcgcuc

SEQ ID NO: 1335 - RNA, 25 nt, Artificial Sequence
  Synthetic oligonucleotide
cuucuucccgcacugugcgcuccuc

SEQ ID NO: 1336 - RNA, 25 nt, Artificial Sequence
  Synthetic oligonucleotide
ucuucccgcacugugcgcuccuccu

SEQ ID NO: 1337 - RNA, 25 nt, Artificial Sequence
  Synthetic oligonucleotide
cuucccgcacugugcgcuccuccug

SEQ ID NO: 1338 - RNA, 25 nt, Artificial Sequence
  Synthetic oligonucleotide
uucccgcacugugcgcuccuccugg

SEQ ID NO: 1339 - RNA, 25 nt, Artificial Sequence
  Synthetic oligonucleotide
gugcgcuccuccugggcuagggcgu

SEQ ID NO: 1340 - RNA, 25 nt, Artificial Sequence
  Synthetic oligonucleotide
cgcuccuccugggcuagggcgucug

SEQ ID NO: 1341 - RNA, 25 nt, Artificial Sequence
  Synthetic oligonucleotide
cacugcugguguugcugaccgcgcu

SEQ ID NO: 1342 - RNA, 25 nt, Artificial Sequence
  Synthetic oligonucleotide
acugcugguguugcugaccgcgcuc

SEQ ID NO: 1343 - RNA, 25 nt, Artificial Sequence
  Synthetic oligonucleotide
cugcugguguugcugaccgcgcucu

SEQ ID NO: 1344 - RNA, 25 nt, Artificial Sequence
  Synthetic oligonucleotide
ugcugguguugcugaccgcgcucug

SEQ ID NO: 1345 - RNA, 25 nt, Artificial Sequence
  Synthetic oligonucleotide
gcugguguugcugaccgcgcucugc

SEQ ID NO: 1346 - RNA, 25 nt, Artificial Sequence
  Synthetic oligonucleotide
cugguguugcugaccgcgcucugcg

SEQ ID NO: 1347 - RNA, 25 nt, Artificial Sequence
  Synthetic oligonucleotide
ugguguugcugaccgcgcucugcgc

SEQ ID NO: 1348 - RNA, 25 nt, Artificial Sequence
  Synthetic oligonucleotide
guguugcugaccgcgcucugcgccg

SEQ ID NO: 1349 - RNA, 25 nt, Artificial Sequence
  Synthetic oligonucleotide
uguugcugaccgcgcucugcgccgc

SEQ ID NO: 1350 - RNA, 25 nt, Artificial Sequence
  Synthetic oligonucleotide
guugcugaccgcgcucugcgccgca

SEQ ID NO: 1351 - RNA, 25 nt, Artificial Sequence
  Synthetic oligonucleotide
uugcugaccgcgcucugcgccgcag

SEQ ID NO: 1352 - RNA, 25 nt, Artificial Sequence
  Synthetic oligonucleotide
cugaccgcgcucugcgccgcaggug

SEQ ID NO: 1353 - RNA, 25 nt, Artificial Sequence
  Synthetic oligonucleotide
ugaccgcgcucugcgccgcaggugg

SEQ ID NO: 1354 - RNA, 25 nt, Artificial Sequence
  Synthetic oligonucleotide
cugauuggugcugugcgauucagca

SEQ ID NO: 1355 - RNA, 25 nt, Artificial Sequence
  Synthetic oligonucleotide
ugauuggugcugugcgauucagcaa

SEQ ID NO: 1356 - RNA, 25 nt, Artificial Sequence
  Synthetic oligonucleotide
gauuggugcugugcgauucagcaac

SEQ ID NO: 1357 - RNA, 25 nt, Artificial Sequence
  Synthetic oligonucleotide
uuggugcugugcgauucagcaacaa

SEQ ID NO: 1358 - RNA, 25 nt, Artificial Sequence
  Synthetic oligonucleotide
ggugcugugcgauucagcaacaacc

SEQ ID NO: 1359 - RNA, 25 nt, Artificial Sequence
  Synthetic oligonucleotide
gugcugugcgauucagcaacaaccc

SEQ ID NO: 1360 - RNA, 25 nt, Artificial Sequence
  Synthetic oligonucleotide
caagcugucccaauggaagcugcug

SEQ ID NO: 1361 - RNA, 25 nt, Artificial Sequence
  Synthetic oligonucleotide
gugcccagcaauguucccaucgcug

SEQ ID NO: 1362 - RNA, 25 nt, Artificial Sequence
  Synthetic oligonucleotide
aaguacagcuuuggugccaccugug

SEQ ID NO: 1363 - RNA, 25 nt, Artificial Sequence
  Synthetic oligonucleotide
gucgcaaaguuuguaauggcauagg

SEQ ID NO: 1364 - RNA, 25 nt, Artificial Sequence
  Synthetic oligonucleotide
gauucuuucacgcgcacuccuccuc

SEQ ID NO: 1365 - RNA, 25 nt, Artificial Sequence
  Synthetic oligonucleotide
caggcuuuuugcugauucaggcuug

SEQ ID NO: 1366 - RNA, 25 nt, Artificial Sequence
  Synthetic oligonucleotide
caggcuuggccugauaacuggacug

SEQ ID NO: 1367 - RNA, 25 nt, Artificial Sequence
  Synthetic oligonucleotide
ggcuuggccugauaacuggacugac

SEQ ID NO: 1368 - RNA, 25 nt, Artificial Sequence
  Synthetic oligonucleotide
uuggccugauaacuggacugaccuc

SEQ ID NO: 1369 - RNA, 25 nt, Artificial Sequence
  Synthetic oligonucleotide
gccaacuguaccuauggaugugcug

SEQ ID NO: 1370 - RNA, 25 nt, Artificial Sequence
  Synthetic oligonucleotide
cugggauuguggguggccuccucuu

SEQ ID NO: 1371 - RNA, 25 nt, Artificial Sequence
  Synthetic oligonucleotide
ugguggcccuugggauuggccuauu

SEQ ID NO: 1372 - RNA, 25 nt, Artificial Sequence
  Synthetic oligonucleotide
uuggccuauucaugcgaagacguca

SEQ ID NO: 1373 - RNA, 25 nt, Artificial Sequence
  Synthetic oligonucleotide
ccgccugcuucaagagagagagcuc

SEQ ID NO: 1374 - RNA, 25 nt, Artificial Sequence
  Synthetic oligonucleotide
cgccugcuucaagagagagagcucg

SEQ ID NO: 1375 - RNA, 25 nt, Artificial Sequence
  Synthetic oligonucleotide
gccugcuucaagagagagagcucgu

SEQ ID NO: 1376 - RNA, 25 nt, Artificial Sequence
  Synthetic oligonucleotide
ggacaacccucauguaugccgccuc

SEQ ID NO: 1377 - RNA, 25 nt, Artificial Sequence
  Synthetic oligonucleotide
uaugccgccuccugggcaucugucu

SEQ ID NO: 1378 - RNA, 25 nt, Artificial Sequence
  Synthetic oligonucleotide
gcucaugcccuacgguugccuccug

SEQ ID NO: 1379 - RNA, 25 nt, Artificial Sequence
  Synthetic oligonucleotide
cucaugcccuacgguugccuccugg

SEQ ID NO: 1380 - RNA, 25 nt, Artificial Sequence
  Synthetic oligonucleotide
ucggcguuuggugcaccgugacuug

SEQ ID NO: 1381 - RNA, 25 nt, Artificial Sequence
  Synthetic oligonucleotide
guuuggugcaccgugacuuggcagc

SEQ ID NO: 1382 - RNA, 25 nt, Artificial Sequence
  Synthetic oligonucleotide
gggcuggccaaacugcuuggugcug

SEQ ID NO: 1383 - RNA, 25 nt, Artificial Sequence
  Synthetic oligonucleotide
ggcuggccaaacugcuuggugcuga

SEQ ID NO: 1384 - RNA, 25 nt, Artificial Sequence
  Synthetic oligonucleotide
cuggccaaacugcuuggugcugaag

SEQ ID NO: 1385 - RNA, 25 nt, Artificial Sequence
  Synthetic oligonucleotide
uggccaaacugcuuggugcugaaga

SEQ ID NO: 1386 - RNA, 25 nt, Artificial Sequence
  Synthetic oligonucleotide
caagugcuggaugauagaugcugau

SEQ ID NO: 1387 - RNA, 25 nt, Artificial Sequence
  Synthetic oligonucleotide
aagugcuggaugauagaugcugaua

SEQ ID NO: 1388 - RNA, 25 nt, Artificial Sequence
  Synthetic oligonucleotide
agugcuggaugauagaugcugauag

SEQ ID NO: 1389 - RNA, 25 nt, Artificial Sequence
  Synthetic oligonucleotide
gugcuggaugauagaugcugauagc

SEQ ID NO: 1390 - RNA, 25 nt, Artificial Sequence
  Synthetic oligonucleotide
ugcuggaugauagaugcugauagcc

SEQ ID NO: 1391 - RNA, 25 nt, Artificial Sequence
  Synthetic oligonucleotide
gcuggaugauagaugcugauagccg

SEQ ID NO: 1392 - RNA, 25 nt, Artificial Sequence
  Synthetic oligonucleotide
cuggaugauagaugcugauagccgc

SEQ ID NO: 1393 - RNA, 25 nt, Artificial Sequence
  Synthetic oligonucleotide
uggaugauagaugcugauagccgcc

SEQ ID NO: 1394 - RNA, 25 nt, Artificial Sequence
  Synthetic oligonucleotide
ggaugauagaugcugauagccgccc

SEQ ID NO: 1395 - RNA, 25 nt, Artificial Sequence
  Synthetic oligonucleotide
gaugauagaugcugauagccgccca

SEQ ID NO: 1396 - RNA, 25 nt, Artificial Sequence
  Synthetic oligonucleotide
gauagaugcugauagccgcccaaag

SEQ ID NO: 1397 - RNA, 25 nt, Artificial Sequence
  Synthetic oligonucleotide
uagaugcugauagccgcccaaaguu

SEQ ID NO: 1398 - RNA, 25 nt, Artificial Sequence
  Synthetic oligonucleotide
gcugccgugucaaagaagacgccuu

SEQ ID NO: 1399 - RNA, 25 nt, Artificial Sequence
  Synthetic oligonucleotide
cugccgugucaaagaagacgccuuc

SEQ ID NO: 1400 - RNA, 25 nt, Artificial Sequence
  Synthetic oligonucleotide
gacgccuucuugcagcgguacagcu

SEQ ID NO: 1401 - RNA, 25 nt, Artificial Sequence
  Synthetic oligonucleotide
acgccuucuugcagcgguacagcuc

SEQ ID NO: 1402 - RNA, 25 nt, Artificial Sequence
  Synthetic oligonucleotide
cgccuucuugcagcgguacagcucc

SEQ ID NO: 1403 - RNA, 25 nt, Artificial Sequence
  Synthetic oligonucleotide
gccuucuugcagcgguacagcuccg

SEQ ID NO: 1404 - RNA, 25 nt, Artificial Sequence
  Synthetic oligonucleotide
ccuucuugcagcgguacagcuccga

SEQ ID NO: 1405 - RNA, 25 nt, Artificial Sequence
  Synthetic oligonucleotide
cuucuugcagcgguacagcuccgac

SEQ ID NO: 1406 - RNA, 25 nt, Artificial Sequence
  Synthetic oligonucleotide
uucuugcagcgguacagcuccgacc

SEQ ID NO: 1407 - RNA, 25 nt, Artificial Sequence
  Synthetic oligonucleotide
cuggcuuuaaagcauaacucugaug

SEQ ID NO: 1408 - RNA, 25 nt, Artificial Sequence
  Synthetic oligonucleotide
gugggccucucuccugaugcacuuu

SEQ ID NO: 1409 - RNA, 25 nt, Artificial Sequence
  Synthetic oligonucleotide
ugggccucucuccugaugcacuuug

SEQ ID NO: 1410 - RNA, 25 nt, Artificial Sequence
  Synthetic oligonucleotide
gggccucucuccugaugcacuuugg

SEQ ID NO: 1411 - RNA, 25 nt, Artificial Sequence
  Synthetic oligonucleotide
ggccucucuccugaugcacuuuggg

SEQ ID NO: 1412 - RNA, 25 nt, Artificial Sequence
  Synthetic oligonucleotide
cucucuccugaugcacuuugggaag

SEQ ID NO: 1413 - RNA, 25 nt, Artificial Sequence
  Synthetic oligonucleotide
uugaugcacucuuguagucugguac

SEQ ID NO: 1414 - RNA, 25 nt, Artificial Sequence
  Synthetic oligonucleotide
gacuuccuucuauguuuucuguuuc

SEQ ID NO: 1415 - RNA, 25 nt, Artificial Sequence
  Synthetic oligonucleotide
ucuauguuuucuguuucauuguuuu

SEQ ID NO: 1416 - RNA, 25 nt, Artificial Sequence
  Synthetic oligonucleotide
uguuuuucuuccugguaaacugcag

SEQ ID NO: 1417 - RNA, 25 nt, Artificial Sequence
  Synthetic oligonucleotide
guuuuucuuccugguaaacugcagc

SEQ ID NO: 1418 - RNA, 25 nt, Artificial Sequence
  Synthetic oligonucleotide
uuuuucuuccugguaaacugcagcc

SEQ ID NO: 1419 - RNA, 25 nt, Artificial Sequence
  Synthetic oligonucleotide
ucuuccugguaaacugcagccaaac

SEQ ID NO: 1420 - RNA, 25 nt, Artificial Sequence
  Synthetic oligonucleotide
cgaucuuccuaaugcugugacccuu

SEQ ID NO: 1421 - RNA, 25 nt, Artificial Sequence
  Synthetic oligonucleotide
gaucuuccuaaugcugugacccuuu

SEQ ID NO: 1422 - RNA, 25 nt, Artificial Sequence
  Synthetic oligonucleotide
guugcuacuucauaacuguaaauuu

SEQ ID NO: 1423 - RNA, 25 nt, Artificial Sequence
  Synthetic oligonucleotide
uugcagcauccucugguuuccuaac

SEQ ID NO: 1424 - RNA, 25 nt, Artificial Sequence
  Synthetic oligonucleotide
uugcaagccacucuaacuguagcaa

SEQ ID NO: 1425 - DNA, 21 bp, Artificial Sequence
  Synthetic oligonucleotide
ggcgcagcgcggccgcagcag

SEQ ID NO: 1426 - DNA, 21 bp, Artificial Sequence
  Synthetic oligonucleotide
gcgcagcgcggccgcagcagc

SEQ ID NO: 1427 - DNA, 21 bp, Artificial Sequence
  Synthetic oligonucleotide
gcagcgcggccgcagcagcct

SEQ ID NO: 1428 - DNA, 21 bp, Artificial Sequence
  Synthetic oligonucleotide
cagcgctcctggcgctgctgg

SEQ ID NO: 1429 - DNA, 21 bp, Artificial Sequence
  Synthetic oligonucleotide
gcgctcctggcgctgctggct

SEQ ID NO: 1430 - DNA, 21 bp, Artificial Sequence
  Synthetic oligonucleotide
gctcctggcgctgctggctgc

SEQ ID NO: 1431 - DNA, 21 bp, Artificial Sequence
  Synthetic oligonucleotide
cagttgggcacttttgaagat

SEQ ID NO: 1432 - DNA, 21 bp, Artificial Sequence
  Synthetic oligonucleotide
tgggaatttggaaattaccta

SEQ ID NO: 1433 - DNA, 21 bp, Artificial Sequence
  Synthetic oligonucleotide
aattatgatctttccttctta

SEQ ID NO: 1434 - DNA, 21 bp, Artificial Sequence
  Synthetic oligonucleotide
gtggctggttatgtcctcatt

SEQ ID NO: 1435 - DNA, 21 bp, Artificial Sequence
  Synthetic oligonucleotide
tgcccatgagaaatttacagg

SEQ ID NO: 1436 - DNA, 21 bp, Artificial Sequence
  Synthetic oligonucleotide
cctgcatggcgccgtgcggtt

SEQ ID NO: 1437 - DNA, 21 bp, Artificial Sequence
  Synthetic oligonucleotide
tggcgccgtgcggttcagcaa

SEQ ID NO: 1438 - DNA, 21 bp, Artificial Sequence
  Synthetic oligonucleotide
tggcgccgtgcggttcagcaa

SEQ ID NO: 1439 - DNA, 21 bp, Artificial Sequence
  Synthetic oligonucleotide
gcgccgtgcggttcagcaaca

SEQ ID NO: 1440 - DNA, 21 bp, Artificial Sequence
  Synthetic oligonucleotide
cgccgtgcggttcagcaacaa

SEQ ID NO: 1441 - DNA, 21 bp, Artificial Sequence
  Synthetic oligonucleotide
cagctgccaaaagtgtgatcc

SEQ ID NO: 1442 - DNA, 21 bp, Artificial Sequence
  Synthetic oligonucleotide
atctgtgcccagcagtgctcc

SEQ ID NO: 1443 - DNA, 21 bp, Artificial Sequence
  Synthetic oligonucleotide
ctgtgcccagcagtgctccgg

SEQ ID NO: 1444 - DNA, 21 bp, Artificial Sequence
  Synthetic oligonucleotide
gtgctccgggcgctgccgtgg

SEQ ID NO: 1445 - DNA, 21 bp, Artificial Sequence
  Synthetic oligonucleotide
gagagcgactgcctggtctgc

SEQ ID NO: 1446 - DNA, 21 bp, Artificial Sequence
  Synthetic oligonucleotide
ctgcctggtctgccgcaaatt

SEQ ID NO: 1447 - DNA, 21 bp, Artificial Sequence
  Synthetic oligonucleotide
gacagatcacggctcgtgcgt

SEQ ID NO: 1448 - DNA, 21 bp, Artificial Sequence
  Synthetic oligonucleotide
ccgcaaagtgtgtaacggaat

SEQ ID NO: 1449 - DNA, 21 bp, Artificial Sequence
  Synthetic oligonucleotide
cggaataggtattggtgaatt

SEQ ID NO: 1450 - DNA, 21 bp, Artificial Sequence
  Synthetic oligonucleotide
ctacgaatattaaacacttca

SEQ ID NO: 1451 - DNA, 21 bp, Artificial Sequence
  Synthetic oligonucleotide
ccacaggaactggatattctg

SEQ ID NO: 1452 - DNA, 21 bp, Artificial Sequence
  Synthetic oligonucleotide
cacagggtttttgctgattca

SEQ ID NO: 1453 - DNA, 21 bp, Artificial Sequence
  Synthetic oligonucleotide
ttcaggaaacaaaaatttgtg

SEQ ID NO: 1454 - DNA, 21 bp, Artificial Sequence
  Synthetic oligonucleotide
gtgctatgcaaatacaataaa

SEQ ID NO: 1455 - DNA, 21 bp, Artificial Sequence
  Synthetic oligonucleotide
ccggtcagaaaaccaaaatta

SEQ ID NO: 1456 - DNA, 21 bp, Artificial Sequence
  Synthetic oligonucleotide
ctgcgtctcttgccggaatgt

SEQ ID NO: 1457 - DNA, 21 bp, Artificial Sequence
  Synthetic oligonucleotide
gggccctcctcttgctgctgg

SEQ ID NO: 1458 - DNA, 21 bp, Artificial Sequence
  Synthetic oligonucleotide
ggccctcctcttgctgctggt

SEQ ID NO: 1459 - DNA, 21 bp, Artificial Sequence
  Synthetic oligonucleotide
ctcctcttgctgctggtggtg

SEQ ID NO: 1460 - DNA, 21 bp, Artificial Sequence
  Synthetic oligonucleotide
tcctcttgctgctggtggtgg

SEQ ID NO: 1461 - DNA, 21 bp, Artificial Sequence
  Synthetic oligonucleotide
cggaagcgcacgctgcggagg

SEQ ID NO: 1462 - DNA, 21 bp, Artificial Sequence
  Synthetic oligonucleotide
aagcgcacgctgcggaggctg

SEQ ID NO: 1463 - DNA, 21 bp, Artificial Sequence
  Synthetic oligonucleotide
aactgaattcaaaaagatcaa

SEQ ID NO: 1464 - DNA, 21 bp, Artificial Sequence
  Synthetic oligonucleotide
caaagtgctgggctccggtgc

SEQ ID NO: 1465 - DNA, 21 bp, Artificial Sequence
  Synthetic oligonucleotide
aagtgctgggctccggtgcgt

SEQ ID NO: 1466 - DNA, 21 bp, Artificial Sequence
  Synthetic oligonucleotide
agtgctgggctccggtgcgtt

SEQ ID NO: 1467 - DNA, 21 bp, Artificial Sequence
  Synthetic oligonucleotide
gtgctgggctccggtgcgttc

SEQ ID NO: 1468 - DNA, 21 bp, Artificial Sequence
  Synthetic oligonucleotide
tgctgggctccggtgcgttcg

SEQ ID NO: 1469 - DNA, 21 bp, Artificial Sequence
  Synthetic oligonucleotide
cgtgtgccgcctgctgggcat

SEQ ID NO: 1470 - DNA, 21 bp, Artificial Sequence
  Synthetic oligonucleotide
gtgtgccgcctgctgggcatc

SEQ ID NO: 1471 - DNA, 21 bp, Artificial Sequence
  Synthetic oligonucleotide
gtgccgcctgctgggcatctg

SEQ ID NO: 1472 - DNA, 21 bp, Artificial Sequence
  Synthetic oligonucleotide
caccgtgcagctcatcacgca

SEQ ID NO: 1473 - DNA, 21 bp, Artificial Sequence
  Synthetic oligonucleotide
cgtgcagctcatcacgcagct

SEQ ID NO: 1474 - DNA, 21 bp, Artificial Sequence
  Synthetic oligonucleotide
cagctcatcacgcagctcatg

SEQ ID NO: 1475 - DNA, 21 bp, Artificial Sequence
  Synthetic oligonucleotide
agctcatcacgcagctcatgc

SEQ ID NO: 1476 - DNA, 21 bp, Artificial Sequence
  Synthetic oligonucleotide
cagctcatgcccttcggctgc

SEQ ID NO: 1477 - DNA, 21 bp, Artificial Sequence
  Synthetic oligonucleotide
agctcatgcccttcggctgcc

SEQ ID NO: 1478 - DNA, 21 bp, Artificial Sequence
  Synthetic oligonucleotide
ttggaggaccgtcgcttggtg

SEQ ID NO: 1479 - DNA, 21 bp, Artificial Sequence
  Synthetic oligonucleotide
ggaggaccgtcgcttggtgca

SEQ ID NO: 1480 - DNA, 21 bp, Artificial Sequence
  Synthetic oligonucleotide
gaggaccgtcgcttggtgcac

SEQ ID NO: 1481 - DNA, 21 bp, Artificial Sequence
  Synthetic oligonucleotide
aggaccgtcgcttggtgcacc

SEQ ID NO: 1482 - DNA, 21 bp, Artificial Sequence
  Synthetic oligonucleotide
gaccgtcgcttggtgcaccgc

SEQ ID NO: 1483 - DNA, 21 bp, Artificial Sequence
  Synthetic oligonucleotide
ccgtcgcttggtgcaccgcga

SEQ ID NO: 1484 - DNA, 21 bp, Artificial Sequence
  Synthetic oligonucleotide
gtcgcttggtgcaccgcgacc

SEQ ID NO: 1485 - DNA, 21 bp, Artificial Sequence
  Synthetic oligonucleotide
tcgcttggtgcaccgcgacct

SEQ ID NO: 1486 - DNA, 21 bp, Artificial Sequence
  Synthetic oligonucleotide
gcttggtgcaccgcgacctgg

SEQ ID NO: 1487 - DNA, 21 bp, Artificial Sequence
  Synthetic oligonucleotide
ggcattggaatcaattttaca

SEQ ID NO: 1488 - DNA, 21 bp, Artificial Sequence
  Synthetic oligonucleotide
tcaagtgctggatgatagacg

SEQ ID NO: 1489 - DNA, 21 bp, Artificial Sequence
  Synthetic oligonucleotide
aagtgctggatgatagacgca

SEQ ID NO: 1490 - DNA, 21 bp, Artificial Sequence
  Synthetic oligonucleotide
agtgctggatgatagacgcag

SEQ ID NO: 1491 - DNA, 21 bp, Artificial Sequence
  Synthetic oligonucleotide
tgctggatgatagacgcagat

SEQ ID NO: 1492 - DNA, 21 bp, Artificial Sequence
  Synthetic oligonucleotide
ctcctgagctctctgagtgca

SEQ ID NO: 1493 - DNA, 21 bp, Artificial Sequence
  Synthetic oligonucleotide
ctgagctctctgagtgcaacc

SEQ ID NO: 1494 - DNA, 21 bp, Artificial Sequence
  Synthetic oligonucleotide
aagctgtcccatcaaggaaga

SEQ ID NO: 1495 - DNA, 21 bp, Artificial Sequence
  Synthetic oligonucleotide
agctgtcccatcaaggaagac

SEQ ID NO: 1496 - DNA, 21 bp, Artificial Sequence
  Synthetic oligonucleotide
aagacagcttcttgcagcgat

SEQ ID NO: 1497 - DNA, 21 bp, Artificial Sequence
  Synthetic oligonucleotide
agacagcttcttgcagcgata

SEQ ID NO: 1498 - DNA, 21 bp, Artificial Sequence
  Synthetic oligonucleotide
gacagcttcttgcagcgatac

SEQ ID NO: 1499 - DNA, 21 bp, Artificial Sequence
  Synthetic oligonucleotide
acagcttcttgcagcgataca

SEQ ID NO: 1500 - DNA, 21 bp, Artificial Sequence
  Synthetic oligonucleotide
cagcttcttgcagcgatacag

SEQ ID NO: 1501 - DNA, 21 bp, Artificial Sequence
  Synthetic oligonucleotide
gcttcttgcagcgatacagct

SEQ ID NO: 1502 - DNA, 21 bp, Artificial Sequence
  Synthetic oligonucleotide
ccacaaagcagtgaatttatt

SEQ ID NO: 1503 - DNA, 21 bp, Artificial Sequence
  Synthetic oligonucleotide
gtatatttgaaaaaaaaaaaa

SEQ ID NO: 1504 - DNA, 21 bp, Artificial Sequence
  Synthetic oligonucleotide
tgtgaggatttttattgattg

SEQ ID NO: 1505 - DNA, 21 bp, Artificial Sequence
  Synthetic oligonucleotide
cgctattgatttttacttcaa

SEQ ID NO: 1506 - DNA, 21 bp, Artificial Sequence
  Synthetic oligonucleotide
aaggaagaagcttgctggtag

SEQ ID NO: 1507 - DNA, 21 bp, Artificial Sequence
  Synthetic oligonucleotide
aggaagaagcttgctggtagc

SEQ ID NO: 1508 - DNA, 21 bp, Artificial Sequence
  Synthetic oligonucleotide
ggaagaagcttgctggtagca

SEQ ID NO: 1509 - DNA, 21 bp, Artificial Sequence
  Synthetic oligonucleotide
gaagaagcttgctggtagcac

SEQ ID NO: 1510 - DNA, 21 bp, Artificial Sequence
  Synthetic oligonucleotide
aagaagcttgctggtagcact

SEQ ID NO: 1511 - DNA, 21 bp, Artificial Sequence
  Synthetic oligonucleotide
gaagcttgctggtagcacttg

SEQ ID NO: 1512 - DNA, 21 bp, Artificial Sequence
  Synthetic oligonucleotide
aagcttgctggtagcacttgc

SEQ ID NO: 1513 - DNA, 21 bp, Artificial Sequence
  Synthetic oligonucleotide
agcttgctggtagcacttgct

SEQ ID NO: 1514 - DNA, 21 bp, Artificial Sequence
  Synthetic oligonucleotide
gcttgctggtagcacttgcta

SEQ ID NO: 1515 - DNA, 21 bp, Artificial Sequence
  Synthetic oligonucleotide
cttgctggtagcacttgctac

SEQ ID NO: 1516 - DNA, 21 bp, Artificial Sequence
  Synthetic oligonucleotide
ttgctggtagcacttgctacc

SEQ ID NO: 1517 - DNA, 21 bp, Artificial Sequence
  Synthetic oligonucleotide
ggatgcttgattccagtggtt

SEQ ID NO: 1518 - DNA, 21 bp, Artificial Sequence
  Synthetic oligonucleotide
gatgcttgattccagtggttc

SEQ ID NO: 1519 - DNA, 21 bp, Artificial Sequence
  Synthetic oligonucleotide
agcaggccggatcggtactgt

SEQ ID NO: 1520 - DNA, 21 bp, Artificial Sequence
  Synthetic oligonucleotide
gccggatcggtactgtatcaa

SEQ ID NO: 1521 - DNA, 21 bp, Artificial Sequence
  Synthetic oligonucleotide
tccttagacttacttttgtaa

SEQ ID NO: 1522 - DNA, 21 bp, Artificial Sequence
  Synthetic oligonucleotide
ctgtcttgctgtcatgaaatc

SEQ ID NO: 1523 - DNA, 21 bp, Artificial Sequence
  Synthetic oligonucleotide
cctaaggatagcaccgctttt

SEQ ID NO: 1524 - DNA, 21 bp, Artificial Sequence
  Synthetic oligonucleotide
taaggatagcaccgcttttgt

SEQ ID NO: 1525 - DNA, 21 bp, Artificial Sequence
  Synthetic oligonucleotide
aaggatagcaccgcttttgtt

SEQ ID NO: 1526 - DNA, 21 bp, Artificial Sequence
  Synthetic oligonucleotide
aggatagcaccgcttttgttc

SEQ ID NO: 1527 - DNA, 21 bp, Artificial Sequence
  Synthetic oligonucleotide
ggatagcaccgcttttgttct

SEQ ID NO: 1528 - DNA, 21 bp, Artificial Sequence
  Synthetic oligonucleotide
gatagcaccgcttttgttctc

SEQ ID NO: 1529 - DNA, 21 bp, Artificial Sequence
  Synthetic oligonucleotide
atagcaccgcttttgttctcg

SEQ ID NO: 1530 - DNA, 21 bp, Artificial Sequence
  Synthetic oligonucleotide
tagcaccgcttttgttctcgc

SEQ ID NO: 1531 - DNA, 21 bp, Artificial Sequence
  Synthetic oligonucleotide
agcaccgcttttgttctcgca

SEQ ID NO: 1532 - DNA, 21 bp, Artificial Sequence
  Synthetic oligonucleotide
accgcttttgttctcgcaaaa

SEQ ID NO: 1533 - DNA, 21 bp, Artificial Sequence
  Synthetic oligonucleotide
ccgcttttgttctcgcaaaaa

SEQ ID NO: 1534 - DNA, 21 bp, Artificial Sequence
  Synthetic oligonucleotide
cgcttttgttctcgcaaaaac

SEQ ID NO: 1535 - DNA, 21 bp, Artificial Sequence
  Synthetic oligonucleotide
gcttttgttctcgcaaaaacg

SEQ ID NO: 1536 - DNA, 21 bp, Artificial Sequence
  Synthetic oligonucleotide
tgttctcgcaaaaacgtatct

SEQ ID NO: 1537 - DNA, 21 bp, Artificial Sequence
  Synthetic oligonucleotide
caaaattagtttgtgttactt

SEQ ID NO: 1538 - DNA, 21 bp, Artificial Sequence
  Synthetic oligonucleotide
acttatggaagatagttttct

SEQ ID NO: 1539 - DNA, 21 bp, Artificial Sequence
  Synthetic oligonucleotide
cttcaaaagctttttactcaa

SEQ ID NO: 1540 - DNA, 21 bp, Artificial Sequence
  Synthetic oligonucleotide
aaactagggtttgaaattgat

SEQ ID NO: 1541 - DNA, 21 bp, Artificial Sequence
  Synthetic oligonucleotide
cctaaaataatttctctacaa

SEQ ID NO: 1542 - DNA, 21 bp, Artificial Sequence
  Synthetic oligonucleotide
aacagcagtcctttgtaaaca

SEQ ID NO: 1543 - DNA, 21 bp, Artificial Sequence
  Synthetic oligonucleotide
tccaatttatcaaggaagaaa

SEQ ID NO: 1544 - DNA, 21 bp, Artificial Sequence
  Synthetic oligonucleotide
catacaaaatgttccttttgc

SEQ ID NO: 1545 - DNA, 21 bp, Artificial Sequence
  Synthetic oligonucleotide
atgttccttttgcttttaaag

SEQ ID NO: 1546 - DNA, 21 bp, Artificial Sequence
  Synthetic oligonucleotide
tgttccttttgcttttaaagt

SEQ ID NO: 1547 - DNA, 21 bp, Artificial Sequence
  Synthetic oligonucleotide
ttttgcttttaaagtaatttt

SEQ ID NO: 1548 - DNA, 21 bp, Artificial Sequence
  Synthetic oligonucleotide
ttgttaagaaagtatttgatt

SEQ ID NO: 1549 - DNA, 21 bp, Artificial Sequence
  Synthetic oligonucleotide
atttggaaattacctatgtgc

SEQ ID NO: 1550 - DNA, 21 bp, Artificial Sequence
  Synthetic oligonucleotide
tttggaaattacctatgtgca

SEQ ID NO: 1551 - DNA, 21 bp, Artificial Sequence
  Synthetic oligonucleotide
atctttccttcttaaagacca

SEQ ID NO: 1552 - DNA, 21 bp, Artificial Sequence
  Synthetic oligonucleotide
tctttccttcttaaagaccat

SEQ ID NO: 1553 - DNA, 21 bp, Artificial Sequence
  Synthetic oligonucleotide
ctttccttcttaaagaccatc

SEQ ID NO: 1554 - DNA, 21 bp, Artificial Sequence
  Synthetic oligonucleotide
tttccttcttaaagaccatcc

SEQ ID NO: 1555 - DNA, 21 bp, Artificial Sequence
  Synthetic oligonucleotide
ttccttcttaaagaccatcca

SEQ ID NO: 1556 - DNA, 21 bp, Artificial Sequence
  Synthetic oligonucleotide
tccttcttaaagaccatccag

SEQ ID NO: 1557 - DNA, 21 bp, Artificial Sequence
  Synthetic oligonucleotide
ccttcttaaagaccatccagg

SEQ ID NO: 1558 - DNA, 21 bp, Artificial Sequence
  Synthetic oligonucleotide
cttcttaaagaccatccagga

SEQ ID NO: 1559 - DNA, 21 bp, Artificial Sequence
  Synthetic oligonucleotide
ttcttaaagaccatccaggag

SEQ ID NO: 1560 - DNA, 21 bp, Artificial Sequence
  Synthetic oligonucleotide
tcttaaagaccatccaggagg

SEQ ID NO: 1561 - DNA, 21 bp, Artificial Sequence
  Synthetic oligonucleotide
cttaaagaccatccaggaggt

SEQ ID NO: 1562 - DNA, 21 bp, Artificial Sequence
  Synthetic oligonucleotide
ttaaagaccatccaggaggtg

SEQ ID NO: 1563 - DNA, 21 bp, Artificial Sequence
  Synthetic oligonucleotide
taaagaccatccaggaggtgg

SEQ ID NO: 1564 - DNA, 21 bp, Artificial Sequence
  Synthetic oligonucleotide
aaagaccatccaggaggtggc

SEQ ID NO: 1565 - DNA, 21 bp, Artificial Sequence
  Synthetic oligonucleotide
agtgtgatccaagctgtccca

SEQ ID NO: 1566 - DNA, 21 bp, Artificial Sequence
  Synthetic oligonucleotide
gtgtgatccaagctgtcccaa

SEQ ID NO: 1567 - DNA, 21 bp, Artificial Sequence
  Synthetic oligonucleotide
tgtgatccaagctgtcccaat

SEQ ID NO: 1568 - DNA, 21 bp, Artificial Sequence
  Synthetic oligonucleotide
gtgatccaagctgtcccaatg

SEQ ID NO: 1569 - DNA, 21 bp, Artificial Sequence
  Synthetic oligonucleotide
tgatccaagctgtcccaatgg

SEQ ID NO: 1570 - DNA, 21 bp, Artificial Sequence
  Synthetic oligonucleotide
gcaggagaggagaactgccag

SEQ ID NO: 1571 - DNA, 21 bp, Artificial Sequence
  Synthetic oligonucleotide
caggagaggagaactgccaga

SEQ ID NO: 1572 - DNA, 21 bp, Artificial Sequence
  Synthetic oligonucleotide
aggagaggagaactgccagaa

SEQ ID NO: 1573 - DNA, 21 bp, Artificial Sequence
  Synthetic oligonucleotide
ggagaggagaactgccagaaa

SEQ ID NO: 1574 - DNA, 21 bp, Artificial Sequence
  Synthetic oligonucleotide
actgaccaaaatcatctgtgc

SEQ ID NO: 1575 - DNA, 21 bp, Artificial Sequence
  Synthetic oligonucleotide
ctgaccaaaatcatctgtgcc

SEQ ID NO: 1576 - DNA, 21 bp, Artificial Sequence
  Synthetic oligonucleotide
tgaccaaaatcatctgtgccc

SEQ ID NO: 1577 - DNA, 21 bp, Artificial Sequence
  Synthetic oligonucleotide
gaccaaaatcatctgtgccca

SEQ ID NO: 1578 - DNA, 21 bp, Artificial Sequence
  Synthetic oligonucleotide
accaaaatcatctgtgcccag

SEQ ID NO: 1579 - DNA, 21 bp, Artificial Sequence
  Synthetic oligonucleotide
ccaaaatcatctgtgcccagc

SEQ ID NO: 1580 - DNA, 21 bp, Artificial Sequence
  Synthetic oligonucleotide
caaaatcatctgtgcccagca

SEQ ID NO: 1581 - DNA, 21 bp, Artificial Sequence
  Synthetic oligonucleotide
cccagtgactgctgccacaac

SEQ ID NO: 1582 - DNA, 21 bp, Artificial Sequence
  Synthetic oligonucleotide
ccagtgactgctgccacaacc

SEQ ID NO: 1583 - DNA, 21 bp, Artificial Sequence
  Synthetic oligonucleotide
cagtgactgctgccacaacca

SEQ ID NO: 1584 - DNA, 21 bp, Artificial Sequence
  Synthetic oligonucleotide
ctcactctccataaatgctac

SEQ ID NO: 1585 - DNA, 21 bp, Artificial Sequence
  Synthetic oligonucleotide
ggtttttgctgattcaggctt

SEQ ID NO: 1586 - DNA, 21 bp, Artificial Sequence
  Synthetic oligonucleotide
gtttttgctgattcaggcttg

SEQ ID NO: 1587 - DNA, 21 bp, Artificial Sequence
  Synthetic oligonucleotide
tttttgctgattcaggcttgg

SEQ ID NO: 1588 - DNA, 21 bp, Artificial Sequence
  Synthetic oligonucleotide
ttttgctgattcaggcttggc

SEQ ID NO: 1589 - DNA, 21 bp, Artificial Sequence
  Synthetic oligonucleotide
tttgctgattcaggcttggcc

SEQ ID NO: 1590 - DNA, 21 bp, Artificial Sequence
  Synthetic oligonucleotide
ttgctgattcaggcttggcct

SEQ ID NO: 1591 - DNA, 21 bp, Artificial Sequence
  Synthetic oligonucleotide
tgctgattcaggcttggcctg

SEQ ID NO: 1592 - DNA, 21 bp, Artificial Sequence
  Synthetic oligonucleotide
gctgattcaggcttggcctga

SEQ ID NO: 1593 - DNA, 21 bp, Artificial Sequence
  Synthetic oligonucleotide
ccaagcaacatggtcagtttt

SEQ ID NO: 1594 - DNA, 21 bp, Artificial Sequence
  Synthetic oligonucleotide
caagcaacatggtcagttttc

SEQ ID NO: 1595 - DNA, 21 bp, Artificial Sequence
  Synthetic oligonucleotide
aagcaacatggtcagttttct

SEQ ID NO: 1596 - DNA, 21 bp, Artificial Sequence
  Synthetic oligonucleotide
tacaataaactggaaaaaact

SEQ ID NO: 1597 - DNA, 21 bp, Artificial Sequence
  Synthetic oligonucleotide
ctcaggccatgaacatcacct

SEQ ID NO: 1598 - DNA, 21 bp, Artificial Sequence
  Synthetic oligonucleotide
tcaggccatgaacatcacctg

SEQ ID NO: 1599 - DNA, 21 bp, Artificial Sequence
  Synthetic oligonucleotide
gtatccagtgtgcccactaca

SEQ ID NO: 1600 - DNA, 21 bp, Artificial Sequence
  Synthetic oligonucleotide
tatccagtgtgcccactacat

SEQ ID NO: 1601 - DNA, 21 bp, Artificial Sequence
  Synthetic oligonucleotide
atccagtgtgcccactacatt

SEQ ID NO: 1602 - DNA, 21 bp, Artificial Sequence
  Synthetic oligonucleotide
tccagtgtgcccactacattg

SEQ ID NO: 1603 - DNA, 21 bp, Artificial Sequence
  Synthetic oligonucleotide
ccagtgtgcccactacattga

SEQ ID NO: 1604 - DNA, 21 bp, Artificial Sequence
  Synthetic oligonucleotide
ctgaattcaaaaagatcaaag

SEQ ID NO: 1605 - DNA, 21 bp, Artificial Sequence
  Synthetic oligonucleotide
tgaattcaaaaagatcaaagt

SEQ ID NO: 1606 - DNA, 21 bp, Artificial Sequence
  Synthetic oligonucleotide
gactctggatcccagaaggtg

SEQ ID NO: 1607 - DNA, 21 bp, Artificial Sequence
  Synthetic oligonucleotide
actctggatcccagaaggtga

SEQ ID NO: 1608 - DNA, 21 bp, Artificial Sequence
  Synthetic oligonucleotide
ctctggatcccagaaggtgag

SEQ ID NO: 1609 - DNA, 21 bp, Artificial Sequence
  Synthetic oligonucleotide
tctggatcccagaaggtgaga

SEQ ID NO: 1610 - DNA, 21 bp, Artificial Sequence
  Synthetic oligonucleotide
ctggatcccagaaggtgagaa

SEQ ID NO: 1611 - DNA, 21 bp, Artificial Sequence
  Synthetic oligonucleotide
tggatcccagaaggtgagaaa

SEQ ID NO: 1612 - DNA, 21 bp, Artificial Sequence
  Synthetic oligonucleotide
ggatcccagaaggtgagaaag

SEQ ID NO: 1613 - DNA, 21 bp, Artificial Sequence
  Synthetic oligonucleotide
gatcccagaaggtgagaaagt

SEQ ID NO: 1614 - DNA, 21 bp, Artificial Sequence
  Synthetic oligonucleotide
cgcagcatgtcaagatcacag

SEQ ID NO: 1615 - DNA, 21 bp, Artificial Sequence
  Synthetic oligonucleotide
gcagcatgtcaagatcacaga

SEQ ID NO: 1616 - DNA, 21 bp, Artificial Sequence
  Synthetic oligonucleotide
cagcatgtcaagatcacagat

SEQ ID NO: 1617 - DNA, 21 bp, Artificial Sequence
  Synthetic oligonucleotide
agcatgtcaagatcacagatt

SEQ ID NO: 1618 - DNA, 21 bp, Artificial Sequence
  Synthetic oligonucleotide
gcatgtcaagatcacagattt

SEQ ID NO: 1619 - DNA, 21 bp, Artificial Sequence
  Synthetic oligonucleotide
catgtcaagatcacagatttt

SEQ ID NO: 1620 - DNA, 21 bp, Artificial Sequence
  Synthetic oligonucleotide
atgtcaagatcacagattttg

SEQ ID NO: 1621 - DNA, 21 bp, Artificial Sequence
  Synthetic oligonucleotide
tgtcaagatcacagattttgg

SEQ ID NO: 1622 - DNA, 21 bp, Artificial Sequence
  Synthetic oligonucleotide
gtcaagatcacagattttggg

SEQ ID NO: 1623 - DNA, 21 bp, Artificial Sequence
  Synthetic oligonucleotide
tcaagatcacagattttgggc

SEQ ID NO: 1624 - DNA, 21 bp, Artificial Sequence
  Synthetic oligonucleotide
caagatcacagattttgggct

SEQ ID NO: 1625 - DNA, 21 bp, Artificial Sequence
  Synthetic oligonucleotide
aagatcacagattttgggctg

SEQ ID NO: 1626 - DNA, 21 bp, Artificial Sequence
  Synthetic oligonucleotide
agatcacagattttgggctgg

SEQ ID NO: 1627 - DNA, 21 bp, Artificial Sequence
  Synthetic oligonucleotide
gatcacagattttgggctggc

SEQ ID NO: 1628 - DNA, 21 bp, Artificial Sequence
  Synthetic oligonucleotide
atcacagattttgggctggcc

SEQ ID NO: 1629 - DNA, 21 bp, Artificial Sequence
  Synthetic oligonucleotide
tcacagattttgggctggcca

SEQ ID NO: 1630 - DNA, 21 bp, Artificial Sequence
  Synthetic oligonucleotide
cacagattttgggctggccaa

SEQ ID NO: 1631 - DNA, 21 bp, Artificial Sequence
  Synthetic oligonucleotide
acagattttgggctggccaaa

SEQ ID NO: 1632 - DNA, 21 bp, Artificial Sequence
  Synthetic oligonucleotide
cagattttgggctggccaaac

SEQ ID NO: 1633 - DNA, 21 bp, Artificial Sequence
  Synthetic oligonucleotide
agattttgggctggccaaact

SEQ ID NO: 1634 - DNA, 21 bp, Artificial Sequence
  Synthetic oligonucleotide
gattttgggctggccaaactg

SEQ ID NO: 1635 - DNA, 21 bp, Artificial Sequence
  Synthetic oligonucleotide
attttgggctggccaaactgc

SEQ ID NO: 1636 - DNA, 21 bp, Artificial Sequence
  Synthetic oligonucleotide
ttttgggctggccaaactgct

SEQ ID NO: 1637 - DNA, 21 bp, Artificial Sequence
  Synthetic oligonucleotide
aggcaaagtgcctatcaagtg

SEQ ID NO: 1638 - DNA, 21 bp, Artificial Sequence
  Synthetic oligonucleotide
ggcaaagtgcctatcaagtgg

SEQ ID NO: 1639 - DNA, 21 bp, Artificial Sequence
  Synthetic oligonucleotide
gcaaagtgcctatcaagtgga

SEQ ID NO: 1640 - DNA, 21 bp, Artificial Sequence
  Synthetic oligonucleotide
caaagtgcctatcaagtggat

SEQ ID NO: 1641 - DNA, 21 bp, Artificial Sequence
  Synthetic oligonucleotide
aaagtgcctatcaagtggatg

SEQ ID NO: 1642 - DNA, 21 bp, Artificial Sequence
  Synthetic oligonucleotide
aagtgcctatcaagtggatgg

SEQ ID NO: 1643 - DNA, 21 bp, Artificial Sequence
  Synthetic oligonucleotide
agtgcctatcaagtggatggc

SEQ ID NO: 1644 - DNA, 21 bp, Artificial Sequence
  Synthetic oligonucleotide
gtaccatcgatgtctacatga

SEQ ID NO: 1645 - DNA, 21 bp, Artificial Sequence
  Synthetic oligonucleotide
taccatcgatgtctacatgat

SEQ ID NO: 1646 - DNA, 21 bp, Artificial Sequence
  Synthetic oligonucleotide
accatcgatgtctacatgatc

SEQ ID NO: 1647 - DNA, 21 bp, Artificial Sequence
  Synthetic oligonucleotide
ccatcgatgtctacatgatca

SEQ ID NO: 1648 - DNA, 21 bp, Artificial Sequence
  Synthetic oligonucleotide
catcgatgtctacatgatcat

SEQ ID NO: 1649 - DNA, 21 bp, Artificial Sequence
  Synthetic oligonucleotide
atcgatgtctacatgatcatg

SEQ ID NO: 1650 - DNA, 21 bp, Artificial Sequence
  Synthetic oligonucleotide
tcgatgtctacatgatcatgg

SEQ ID NO: 1651 - DNA, 21 bp, Artificial Sequence
  Synthetic oligonucleotide
cgatgtctacatgatcatggt

SEQ ID NO: 1652 - DNA, 21 bp, Artificial Sequence
  Synthetic oligonucleotide
gatgtctacatgatcatggtc

SEQ ID NO: 1653 - DNA, 21 bp, Artificial Sequence
  Synthetic oligonucleotide
atgtctacatgatcatggtca

SEQ ID NO: 1654 - DNA, 21 bp, Artificial Sequence
  Synthetic oligonucleotide
tgtctacatgatcatggtcaa

SEQ ID NO: 1655 - DNA, 21 bp, Artificial Sequence
  Synthetic oligonucleotide
gtctacatgatcatggtcaag

SEQ ID NO: 1656 - DNA, 21 bp, Artificial Sequence
  Synthetic oligonucleotide
tctacatgatcatggtcaagt

SEQ ID NO: 1657 - DNA, 21 bp, Artificial Sequence
  Synthetic oligonucleotide
ctacatgatcatggtcaagtg

SEQ ID NO: 1658 - DNA, 21 bp, Artificial Sequence
  Synthetic oligonucleotide
tacatgatcatggtcaagtgc

SEQ ID NO: 1659 - DNA, 21 bp, Artificial Sequence
  Synthetic oligonucleotide
acatgatcatggtcaagtgct

SEQ ID NO: 1660 - DNA, 21 bp, Artificial Sequence
  Synthetic oligonucleotide
catgatcatggtcaagtgctg

SEQ ID NO: 1661 - DNA, 21 bp, Artificial Sequence
  Synthetic oligonucleotide
atgatcatggtcaagtgctgg

SEQ ID NO: 1662 - DNA, 21 bp, Artificial Sequence
  Synthetic oligonucleotide
tgatcatggtcaagtgctgga

SEQ ID NO: 1663 - DNA, 21 bp, Artificial Sequence
  Synthetic oligonucleotide
gatcatggtcaagtgctggat

SEQ ID NO: 1664 - DNA, 21 bp, Artificial Sequence
  Synthetic oligonucleotide
atcatggtcaagtgctggatg

SEQ ID NO: 1665 - DNA, 21 bp, Artificial Sequence
  Synthetic oligonucleotide
tcatggtcaagtgctggatga

SEQ ID NO: 1666 - DNA, 21 bp, Artificial Sequence
  Synthetic oligonucleotide
catggtcaagtgctggatgat

SEQ ID NO: 1667 - DNA, 21 bp, Artificial Sequence
  Synthetic oligonucleotide
atggtcaagtgctggatgata

SEQ ID NO: 1668 - DNA, 21 bp, Artificial Sequence
  Synthetic oligonucleotide
tggtcaagtgctggatgatag

SEQ ID NO: 1669 - DNA, 21 bp, Artificial Sequence
  Synthetic oligonucleotide
ggtcaagtgctggatgataga

SEQ ID NO: 1670 - DNA, 21 bp, Artificial Sequence
  Synthetic oligonucleotide
tcgaattctccaaaatggccc

SEQ ID NO: 1671 - DNA, 21 bp, Artificial Sequence
  Synthetic oligonucleotide
cgaattctccaaaatggcccg

SEQ ID NO: 1672 - DNA, 21 bp, Artificial Sequence
  Synthetic oligonucleotide
gggatgaaagaatgcatttgc

SEQ ID NO: 1673 - DNA, 21 bp, Artificial Sequence
  Synthetic oligonucleotide
ggatgaaagaatgcatttgcc

SEQ ID NO: 1674 - DNA, 21 bp, Artificial Sequence
  Synthetic oligonucleotide
gatgaaagaatgcatttgcca

SEQ ID NO: 1675 - DNA, 21 bp, Artificial Sequence
  Synthetic oligonucleotide
atgaaagaatgcatttgccaa

SEQ ID NO: 1676 - DNA, 21 bp, Artificial Sequence
  Synthetic oligonucleotide
tgaaagaatgcatttgccaag

SEQ ID NO: 1677 - DNA, 21 bp, Artificial Sequence
  Synthetic oligonucleotide
tggacaaccctgactaccagc

SEQ ID NO: 1678 - DNA, 21 bp, Artificial Sequence
  Synthetic oligonucleotide
ggacaaccctgactaccagca

SEQ ID NO: 1679 - DNA, 21 bp, Artificial Sequence
  Synthetic oligonucleotide
gacaaccctgactaccagcag

SEQ ID NO: 1680 - DNA, 21 bp, Artificial Sequence
  Synthetic oligonucleotide
acaaccctgactaccagcagg

SEQ ID NO: 1681 - DNA, 21 bp, Artificial Sequence
  Synthetic oligonucleotide
caaccctgactaccagcagga

SEQ ID NO: 1682 - DNA, 21 bp, Artificial Sequence
  Synthetic oligonucleotide
aaccctgactaccagcaggac

SEQ ID NO: 1683 - DNA, 21 bp, Artificial Sequence
  Synthetic oligonucleotide
accctgactaccagcaggact

SEQ ID NO: 1684 - DNA, 21 bp, Artificial Sequence
  Synthetic oligonucleotide
ccctgactaccagcaggactt

SEQ ID NO: 1685 - DNA, 21 bp, Artificial Sequence
  Synthetic oligonucleotide
cagcgcaacgcgcagcagcct

SEQ ID NO: 1686 - DNA, 21 bp, Artificial Sequence
  Synthetic oligonucleotide
acgcgcagcagcctccctcct

SEQ ID NO: 1687 - DNA, 21 bp, Artificial Sequence
  Synthetic oligonucleotide
agcctccctcctcttcttccc

SEQ ID NO: 1688 - DNA, 21 bp, Artificial Sequence
  Synthetic oligonucleotide
ctccctcctcttcttcccgca

SEQ ID NO: 1689 - DNA, 21 bp, Artificial Sequence
  Synthetic oligonucleotide
ccctcctcttcttcccgcact

SEQ ID NO: 1690 - DNA, 21 bp, Artificial Sequence
  Synthetic oligonucleotide
ctcctcttcttcccgcactgt

SEQ ID NO: 1691 - DNA, 21 bp, Artificial Sequence
  Synthetic oligonucleotide
ctcttcttcccgcactgtgcg

SEQ ID NO: 1692 - DNA, 21 bp, Artificial Sequence
  Synthetic oligonucleotide
cttcttcccgcactgtgcgct

SEQ ID NO: 1693 - DNA, 21 bp, Artificial Sequence
  Synthetic oligonucleotide
ttcttcccgcactgtgcgctc

SEQ ID NO: 1694 - DNA, 21 bp, Artificial Sequence
  Synthetic oligonucleotide
tcttcccgcactgtgcgctcc

SEQ ID NO: 1695 - DNA, 21 bp, Artificial Sequence
  Synthetic oligonucleotide
ctgtgcgctcctcctgggcta

SEQ ID NO: 1696 - DNA, 21 bp, Artificial Sequence
  Synthetic oligonucleotide
tgcgctcctcctgggctaggg

SEQ ID NO: 1697 - DNA, 21 bp, Artificial Sequence
  Synthetic oligonucleotide
cacactgctggtgttgctgac

SEQ ID NO: 1698 - DNA, 21 bp, Artificial Sequence
  Synthetic oligonucleotide
acactgctggtgttgctgacc

SEQ ID NO: 1699 - DNA, 21 bp, Artificial Sequence
  Synthetic oligonucleotide
cactgctggtgttgctgaccg

SEQ ID NO: 1700 - DNA, 21 bp, Artificial Sequence
  Synthetic oligonucleotide
actgctggtgttgctgaccgc

SEQ ID NO: 1701 - DNA, 21 bp, Artificial Sequence
  Synthetic oligonucleotide
ctgctggtgttgctgaccgcg

SEQ ID NO: 1702 - DNA, 21 bp, Artificial Sequence
  Synthetic oligonucleotide
tgctggtgttgctgaccgcgc

SEQ ID NO: 1703 - DNA, 21 bp, Artificial Sequence
  Synthetic oligonucleotide
gctggtgttgctgaccgcgct

SEQ ID NO: 1704 - DNA, 21 bp, Artificial Sequence
  Synthetic oligonucleotide
tggtgttgctgaccgcgctct

SEQ ID NO: 1705 - DNA, 21 bp, Artificial Sequence
  Synthetic oligonucleotide
ggtgttgctgaccgcgctctg

SEQ ID NO: 1706 - DNA, 21 bp, Artificial Sequence
  Synthetic oligonucleotide
gtgttgctgaccgcgctctgc

SEQ ID NO: 1707 - DNA, 21 bp, Artificial Sequence
  Synthetic oligonucleotide
tgttgctgaccgcgctctgcg

SEQ ID NO: 1708 - DNA, 21 bp, Artificial Sequence
  Synthetic oligonucleotide
tgctgaccgcgctctgcgccg

SEQ ID NO: 1709 - DNA, 21 bp, Artificial Sequence
  Synthetic oligonucleotide
gctgaccgcgctctgcgccgc

SEQ ID NO: 1710 - DNA, 21 bp, Artificial Sequence
  Synthetic oligonucleotide
tcctgattggtgctgtgcgat

SEQ ID NO: 1711 - DNA, 21 bp, Artificial Sequence
  Synthetic oligonucleotide
cctgattggtgctgtgcgatt

SEQ ID NO: 1712 - DNA, 21 bp, Artificial Sequence
  Synthetic oligonucleotide
ctgattggtgctgtgcgattc

SEQ ID NO: 1713 - DNA, 21 bp, Artificial Sequence
  Synthetic oligonucleotide
gattggtgctgtgcgattcag

SEQ ID NO: 1714 - DNA, 21 bp, Artificial Sequence
  Synthetic oligonucleotide
ttggtgctgtgcgattcagca

SEQ ID NO: 1715 - DNA, 21 bp, Artificial Sequence
  Synthetic oligonucleotide
tggtgctgtgcgattcagcaa

SEQ ID NO: 1716 - DNA, 21 bp, Artificial Sequence
  Synthetic oligonucleotide
tccaagctgtcccaatggaag

SEQ ID NO: 1717 - DNA, 21 bp, Artificial Sequence
  Synthetic oligonucleotide
ctgtgcccagcaatgttccca

SEQ ID NO: 1718 - DNA, 21 bp, Artificial Sequence
  Synthetic oligonucleotide
ggaagtacagctttggtgcca

SEQ ID NO: 1719 - DNA, 21 bp, Artificial Sequence
  Synthetic oligonucleotide
ctgtcgcaaagtttgtaatgg

SEQ ID NO: 1720 - DNA, 21 bp, Artificial Sequence
  Synthetic oligonucleotide
gggattctttcacgcgcactc

SEQ ID NO: 1721 - DNA, 21 bp, Artificial Sequence
  Synthetic oligonucleotide
aacaggctttttgctgattca

SEQ ID NO: 1722 - DNA, 21 bp, Artificial Sequence
  Synthetic oligonucleotide
ttcaggcttggcctgataact

SEQ ID NO: 1723 - DNA, 21 bp, Artificial Sequence
  Synthetic oligonucleotide
caggcttggcctgataactgg

SEQ ID NO: 1724 - DNA, 21 bp, Artificial Sequence
  Synthetic oligonucleotide
gcttggcctgataactggact

SEQ ID NO: 1725 - DNA, 21 bp, Artificial Sequence
  Synthetic oligonucleotide
acgccaactgtacctatggat

SEQ ID NO: 1726 - DNA, 21 bp, Artificial Sequence
  Synthetic oligonucleotide
cactgggattgtgggtggcct

SEQ ID NO: 1727 - DNA, 21 bp, Artificial Sequence
  Synthetic oligonucleotide
ggtggtggcccttgggattgg

SEQ ID NO: 1728 - DNA, 21 bp, Artificial Sequence
  Synthetic oligonucleotide
gattggcctattcatgcgaag

SEQ ID NO: 1729 - DNA, 21 bp, Artificial Sequence
  Synthetic oligonucleotide
cgccgcctgcttcaagagaga

SEQ ID NO: 1730 - DNA, 21 bp, Artificial Sequence
  Synthetic oligonucleotide
gccgcctgcttcaagagagag

SEQ ID NO: 1731 - DNA, 21 bp, Artificial Sequence
  Synthetic oligonucleotide
ccgcctgcttcaagagagaga

SEQ ID NO: 1732 - DNA, 21 bp, Artificial Sequence
  Synthetic oligonucleotide
gtggacaaccctcatgtatgc

SEQ ID NO: 1733 - DNA, 21 bp, Artificial Sequence
  Synthetic oligonucleotide
tgtatgccgcctcctgggcat

SEQ ID NO: 1734 - DNA, 21 bp, Artificial Sequence
  Synthetic oligonucleotide
cagctcatgccctacggttgc

SEQ ID NO: 1735 - DNA, 21 bp, Artificial Sequence
  Synthetic oligonucleotide
agctcatgccctacggttgcc

SEQ ID NO: 1736 - DNA, 21 bp, Artificial Sequence
  Synthetic oligonucleotide
gatcggcgtttggtgcaccgt

SEQ ID NO: 1737 - DNA, 21 bp, Artificial Sequence
  Synthetic oligonucleotide
gcgtttggtgcaccgtgactt

SEQ ID NO: 1738 - DNA, 21 bp, Artificial Sequence
  Synthetic oligonucleotide
ttgggctggccaaactgcttg

SEQ ID NO: 1739 - DNA, 21 bp, Artificial Sequence
  Synthetic oligonucleotide
tgggctggccaaactgcttgg

SEQ ID NO: 1740 - DNA, 21 bp, Artificial Sequence
  Synthetic oligonucleotide
ggctggccaaactgcttggtg

SEQ ID NO: 1741 - DNA, 21 bp, Artificial Sequence
  Synthetic oligonucleotide
gctggccaaactgcttggtgc

SEQ ID NO: 1742 - DNA, 21 bp, Artificial Sequence
  Synthetic oligonucleotide
gtcaagtgctggatgatagat

SEQ ID NO: 1743 - DNA, 21 bp, Artificial Sequence
  Synthetic oligonucleotide
tcaagtgctggatgatagatg

SEQ ID NO: 1744 - DNA, 21 bp, Artificial Sequence
  Synthetic oligonucleotide
caagtgctggatgatagatgc

SEQ ID NO: 1745 - DNA, 21 bp, Artificial Sequence
  Synthetic oligonucleotide
aagtgctggatgatagatgct

SEQ ID NO: 1746 - DNA, 21 bp, Artificial Sequence
  Synthetic oligonucleotide
agtgctggatgatagatgctg

SEQ ID NO: 1747 - DNA, 21 bp, Artificial Sequence
  Synthetic oligonucleotide
gtgctggatgatagatgctga

SEQ ID NO: 1748 - DNA, 21 bp, Artificial Sequence
  Synthetic oligonucleotide
tgctggatgatagatgctgat

SEQ ID NO: 1749 - DNA, 21 bp, Artificial Sequence
  Synthetic oligonucleotide
gctggatgatagatgctgata

SEQ ID NO: 1750 - DNA, 21 bp, Artificial Sequence
  Synthetic oligonucleotide
ctggatgatagatgctgatag

SEQ ID NO: 1751 - DNA, 21 bp, Artificial Sequence
  Synthetic oligonucleotide
tggatgatagatgctgatagc

SEQ ID NO: 1752 - DNA, 21 bp, Artificial Sequence
  Synthetic oligonucleotide
atgatagatgctgatagccgc

SEQ ID NO: 1753 - DNA, 21 bp, Artificial Sequence
  Synthetic oligonucleotide
gatagatgctgatagccgccc

SEQ ID NO: 1754 - DNA, 21 bp, Artificial Sequence
  Synthetic oligonucleotide
gagctgccgtgtcaaagaaga

SEQ ID NO: 1755 - DNA, 21 bp, Artificial Sequence
  Synthetic oligonucleotide
agctgccgtgtcaaagaagac

SEQ ID NO: 1756 - DNA, 21 bp, Artificial Sequence
  Synthetic oligonucleotide
aagacgccttcttgcagcggt

SEQ ID NO: 1757 - DNA, 21 bp, Artificial Sequence
  Synthetic oligonucleotide
agacgccttcttgcagcggta

SEQ ID NO: 1758 - DNA, 21 bp, Artificial Sequence
  Synthetic oligonucleotide
gacgccttcttgcagcggtac

SEQ ID NO: 1759 - DNA, 21 bp, Artificial Sequence
  Synthetic oligonucleotide
acgccttcttgcagcggtaca

SEQ ID NO: 1760 - DNA, 21 bp, Artificial Sequence
  Synthetic oligonucleotide
cgccttcttgcagcggtacag

SEQ ID NO: 1761 - DNA, 21 bp, Artificial Sequence
  Synthetic oligonucleotide
gccttcttgcagcggtacagc

SEQ ID NO: 1762 - DNA, 21 bp, Artificial Sequence
  Synthetic oligonucleotide
ccttcttgcagcggtacagct

SEQ ID NO: 1763 - DNA, 21 bp, Artificial Sequence
  Synthetic oligonucleotide
gactggctttaaagcataact

SEQ ID NO: 1764 - DNA, 21 bp, Artificial Sequence
  Synthetic oligonucleotide
aagtgggcctctctcctgatg

SEQ ID NO: 1765 - DNA, 21 bp, Artificial Sequence
  Synthetic oligonucleotide
agtgggcctctctcctgatgc

SEQ ID NO: 1766 - DNA, 21 bp, Artificial Sequence
  Synthetic oligonucleotide
gtgggcctctctcctgatgca

SEQ ID NO: 1767 - DNA, 21 bp, Artificial Sequence
  Synthetic oligonucleotide
tgggcctctctcctgatgcac

SEQ ID NO: 1768 - DNA, 21 bp, Artificial Sequence
  Synthetic oligonucleotide
gcctctctcctgatgcacttt

SEQ ID NO: 1769 - DNA, 21 bp, Artificial Sequence
  Synthetic oligonucleotide
gattgatgcactcttgtagtc

SEQ ID NO: 1770 - DNA, 21 bp, Artificial Sequence
  Synthetic oligonucleotide
tagacttccttctatgttttc

SEQ ID NO: 1771 - DNA, 21 bp, Artificial Sequence
  Synthetic oligonucleotide
cttctatgttttctgtttcat

SEQ ID NO: 1772 - DNA, 21 bp, Artificial Sequence
  Synthetic oligonucleotide
tatgtttttcttcctggtaaa

SEQ ID NO: 1773 - DNA, 21 bp, Artificial Sequence
  Synthetic oligonucleotide
atgtttttcttcctggtaaac

SEQ ID NO: 1774 - DNA, 21 bp, Artificial Sequence
  Synthetic oligonucleotide
tgtttttcttcctggtaaact

SEQ ID NO: 1775 - DNA, 21 bp, Artificial Sequence
  Synthetic oligonucleotide
tttcttcctggtaaactgcag

SEQ ID NO: 1776 - DNA, 21 bp, Artificial Sequence
  Synthetic oligonucleotide
ttcgatcttcctaatgctgtg

SEQ ID NO: 1777 - DNA, 21 bp, Artificial Sequence
  Synthetic oligonucleotide
tcgatcttcctaatgctgtga

SEQ ID NO: 1778 - DNA, 21 bp, Artificial Sequence
  Synthetic oligonucleotide
ttgttgctacttcataactgt

SEQ ID NO: 1779 - DNA, 21 bp, Artificial Sequence
  Synthetic oligonucleotide
gcttgcagcatcctctggttt

SEQ ID NO: 1780 - DNA, 21 bp, Artificial Sequence
  Synthetic oligonucleotide
cgttgcaagccactctaactg

SEQ ID NO: 1781 - RNA, 27 nt, Artificial Sequence
  Synthetic oligonucleotide
ggcgcagcgcggccgcagcagccucaa

SEQ ID NO: 1782 - RNA, 27 nt, Artificial Sequence
  Synthetic oligonucleotide
gcgcagcgcggccgcagcagccuccaa

SEQ ID NO: 1783 - RNA, 27 nt, Artificial Sequence
  Synthetic oligonucleotide
gcagcgcggccgcagcagccuccgcaa

SEQ ID NO: 1784 - RNA, 27 nt, Artificial Sequence
  Synthetic oligonucleotide
cagcgcuccuggcgcugcuggcugcaa

SEQ ID NO: 1785 - RNA, 27 nt, Artificial Sequence
  Synthetic oligonucleotide
gcgcuccuggcgcugcuggcugcgcca

SEQ ID NO: 1786 - RNA, 27 nt, Artificial Sequence
  Synthetic oligonucleotide
gcuccuggcgcugcuggcugcgcucca

SEQ ID NO: 1787 - RNA, 27 nt, Artificial Sequence
  Synthetic oligonucleotide
caguugggcacuuuugaagaucauucc

SEQ ID NO: 1788 - RNA, 27 nt, Artificial Sequence
  Synthetic oligonucleotide
ugggaauuuggaaauuaccuaugugac

SEQ ID NO: 1789 - RNA, 27 nt, Artificial Sequence
  Synthetic oligonucleotide
aauuaugaucuuuccuucuuaaagaaa

SEQ ID NO: 1790 - RNA, 27 nt, Artificial Sequence
  Synthetic oligonucleotide
guggcugguuauguccucauugcccca

SEQ ID NO: 1791 - RNA, 27 nt, Artificial Sequence
  Synthetic oligonucleotide
ugcccaugagaaauuuacaggaaauaa

SEQ ID NO: 1792 - RNA, 27 nt, Artificial Sequence
  Synthetic oligonucleotide
ccugcauggcgccgugcgguucagccc

SEQ ID NO: 1793 - RNA, 27 nt, Artificial Sequence
  Synthetic oligonucleotide
uggcgccgugcgguucagcaacaacaa

SEQ ID NO: 1794 - RNA, 27 nt, Artificial Sequence
  Synthetic oligonucleotide
uggcgccgugcgguucagcaacaacaa

SEQ ID NO: 1795 - RNA, 27 nt, Artificial Sequence
  Synthetic oligonucleotide
gcgccgugcgguucagcaacaacccca

SEQ ID NO: 1796 - RNA, 27 nt, Artificial Sequence
  Synthetic oligonucleotide
cgccgugcgguucagcaacaacccuaa

SEQ ID NO: 1797 - RNA, 27 nt, Artificial Sequence
  Synthetic oligonucleotide
cagcugccaaaagugugauccaagcca

SEQ ID NO: 1798 - RNA, 27 nt, Artificial Sequence
  Synthetic oligonucleotide
aucugugcccagcagugcuccgggcaa

SEQ ID NO: 1799 - RNA, 27 nt, Artificial Sequence
  Synthetic oligonucleotide
cugugcccagcagugcuccgggcgcca

SEQ ID NO: 1800 - RNA, 27 nt, Artificial Sequence
  Synthetic oligonucleotide
gugcuccgggcgcugccguggcaagca

SEQ ID NO: 1801 - RNA, 27 nt, Artificial Sequence
  Synthetic oligonucleotide
gagagcgacugccuggucugccgcacc

SEQ ID NO: 1802 - RNA, 27 nt, Artificial Sequence
  Synthetic oligonucleotide
cugccuggucugccgcaaauuccgaac

SEQ ID NO: 1803 - RNA, 27 nt, Artificial Sequence
  Synthetic oligonucleotide
gacagaucacggcucgugcguccgaaa

SEQ ID NO: 1804 - RNA, 27 nt, Artificial Sequence
  Synthetic oligonucleotide
ccgcaaaguguguaacggaauaggucc

SEQ ID NO: 1805 - RNA, 27 nt, Artificial Sequence
  Synthetic oligonucleotide
cggaauagguauuggugaauuuaaaac

SEQ ID NO: 1806 - RNA, 27 nt, Artificial Sequence
  Synthetic oligonucleotide
cuacgaauauuaaacacuucaaaaaac

SEQ ID NO: 1807 - RNA, 27 nt, Artificial Sequence
  Synthetic oligonucleotide
ccacaggaacuggauauucugaaaaaa

SEQ ID NO: 1808 - RNA, 27 nt, Artificial Sequence
  Synthetic oligonucleotide
cacaggguuuuugcugauucaggcuca

SEQ ID NO: 1809 - RNA, 27 nt, Artificial Sequence
  Synthetic oligonucleotide
uucaggaaacaaaaauuugugcuauaa

SEQ ID NO: 1810 - RNA, 27 nt, Artificial Sequence
  Synthetic oligonucleotide
gugcuaugcaaauacaauaaacuggcc

SEQ ID NO: 1811 - RNA, 27 nt, Artificial Sequence
  Synthetic oligonucleotide
ccggucagaaaaccaaaauuauaagac

SEQ ID NO: 1812 - RNA, 27 nt, Artificial Sequence
  Synthetic oligonucleotide
cugcgucucuugccggaaugucagcaa

SEQ ID NO: 1813 - RNA, 27 nt, Artificial Sequence
  Synthetic oligonucleotide
gggcccuccucuugcugcuggugguaa

SEQ ID NO: 1814 - RNA, 27 nt, Artificial Sequence
  Synthetic oligonucleotide
ggcccuccucuugcugcugguggugaa

SEQ ID NO: 1815 - RNA, 27 nt, Artificial Sequence
  Synthetic oligonucleotide
cuccucuugcugcuggugguggcccca

SEQ ID NO: 1816 - RNA, 27 nt, Artificial Sequence
  Synthetic oligonucleotide
uccucuugcugcuggugguggcccuaa

SEQ ID NO: 1817 - RNA, 27 nt, Artificial Sequence
  Synthetic oligonucleotide
cggaagcgcacgcugcggaggcugcca

SEQ ID NO: 1818 - RNA, 27 nt, Artificial Sequence
  Synthetic oligonucleotide
aagcgcacgcugcggaggcugcugcca

SEQ ID NO: 1819 - RNA, 27 nt, Artificial Sequence
  Synthetic oligonucleotide
aacugaauucaaaaagaucaaagugac

SEQ ID NO: 1820 - RNA, 27 nt, Artificial Sequence
  Synthetic oligonucleotide
caaagugcugggcuccggugcguucaa

SEQ ID NO: 1821 - RNA, 27 nt, Artificial Sequence
  Synthetic oligonucleotide
aagugcugggcuccggugcguucggac

SEQ ID NO: 1822 - RNA, 27 nt, Artificial Sequence
  Synthetic oligonucleotide
agugcugggcuccggugcguucggcca

SEQ ID NO: 1823 - RNA, 27 nt, Artificial Sequence
  Synthetic oligonucleotide
gugcugggcuccggugcguucggcaaa

SEQ ID NO: 1824 - RNA, 27 nt, Artificial Sequence
  Synthetic oligonucleotide
ugcugggcuccggugcguucggcacaa

SEQ ID NO: 1825 - RNA, 27 nt, Artificial Sequence
  Synthetic oligonucleotide
cgugugccgccugcugggcaucugcac

SEQ ID NO: 1826 - RNA, 27 nt, Artificial Sequence
  Synthetic oligonucleotide
gugugccgccugcugggcaucugccca

SEQ ID NO: 1827 - RNA, 27 nt, Artificial Sequence
  Synthetic oligonucleotide
gugccgccugcugggcaucugccucca

SEQ ID NO: 1828 - RNA, 27 nt, Artificial Sequence
  Synthetic oligonucleotide
caccgugcagcucaucacgcagcuccc

SEQ ID NO: 1829 - RNA, 27 nt, Artificial Sequence
  Synthetic oligonucleotide
cgugcagcucaucacgcagcucaugaa

SEQ ID NO: 1830 - RNA, 27 nt, Artificial Sequence
  Synthetic oligonucleotide
cagcucaucacgcagcucaugcccuca

SEQ ID NO: 1831 - RNA, 27 nt, Artificial Sequence
  Synthetic oligonucleotide
agcucaucacgcagcucaugcccuuaa

SEQ ID NO: 1832 - RNA, 27 nt, Artificial Sequence
  Synthetic oligonucleotide
cagcucaugcccuucggcugccuccca

SEQ ID NO: 1833 - RNA, 27 nt, Artificial Sequence
  Synthetic oligonucleotide
agcucaugcccuucggcugccuccuaa

SEQ ID NO: 1834 - RNA, 27 nt, Artificial Sequence
  Synthetic oligonucleotide
uuggaggaccgucgcuuggugcaccaa

SEQ ID NO: 1835 - RNA, 27 nt, Artificial Sequence
  Synthetic oligonucleotide
ggaggaccgucgcuuggugcaccgcac

SEQ ID NO: 1836 - RNA, 27 nt, Artificial Sequence
  Synthetic oligonucleotide
gaggaccgucgcuuggugcaccgcgca

SEQ ID NO: 1837 - RNA, 27 nt, Artificial Sequence
  Synthetic oligonucleotide
aggaccgucgcuuggugcaccgcgaaa

SEQ ID NO: 1838 - RNA, 27 nt, Artificial Sequence
  Synthetic oligonucleotide
gaccgucgcuuggugcaccgcgaccca

SEQ ID NO: 1839 - RNA, 27 nt, Artificial Sequence
  Synthetic oligonucleotide
ccgucgcuuggugcaccgcgaccugaa

SEQ ID NO: 1840 - RNA, 27 nt, Artificial Sequence
  Synthetic oligonucleotide
gucgcuuggugcaccgcgaccuggcca

SEQ ID NO: 1841 - RNA, 27 nt, Artificial Sequence
  Synthetic oligonucleotide
ucgcuuggugcaccgcgaccuggcaaa

SEQ ID NO: 1842 - RNA, 27 nt, Artificial Sequence
  Synthetic oligonucleotide
gcuuggugcaccgcgaccuggcagcac

SEQ ID NO: 1843 - RNA, 27 nt, Artificial Sequence
  Synthetic oligonucleotide
ggcauuggaaucaauuuuacacagacc

SEQ ID NO: 1844 - RNA, 27 nt, Artificial Sequence
  Synthetic oligonucleotide
ucaagugcuggaugauagacgcagacc

SEQ ID NO: 1845 - RNA, 27 nt, Artificial Sequence
  Synthetic oligonucleotide
aagugcuggaugauagacgcagauaac

SEQ ID NO: 1846 - RNA, 27 nt, Artificial Sequence
  Synthetic oligonucleotide
agugcuggaugauagacgcagauagca

SEQ ID NO: 1847 - RNA, 27 nt, Artificial Sequence
  Synthetic oligonucleotide
ugcuggaugauagacgcagauagucaa

SEQ ID NO: 1848 - RNA, 27 nt, Artificial Sequence
  Synthetic oligonucleotide
cuccugagcucucugagugcaaccaaa

SEQ ID NO: 1849 - RNA, 27 nt, Artificial Sequence
  Synthetic oligonucleotide
cugagcucucugagugcaaccagcaca

SEQ ID NO: 1850 - RNA, 27 nt, Artificial Sequence
  Synthetic oligonucleotide
aagcugucccaucaaggaagacagccc

SEQ ID NO: 1851 - RNA, 27 nt, Artificial Sequence
  Synthetic oligonucleotide
agcugucccaucaaggaagacagcuca

SEQ ID NO: 1852 - RNA, 27 nt, Artificial Sequence
  Synthetic oligonucleotide
aagacagcuucuugcagcgauacagac

SEQ ID NO: 1853 - RNA, 27 nt, Artificial Sequence
  Synthetic oligonucleotide
agacagcuucuugcagcgauacagcca

SEQ ID NO: 1854 - RNA, 27 nt, Artificial Sequence
  Synthetic oligonucleotide
gacagcuucuugcagcgauacagcuac

SEQ ID NO: 1855 - RNA, 27 nt, Artificial Sequence
  Synthetic oligonucleotide
acagcuucuugcagcgauacagcucca

SEQ ID NO: 1856 - RNA, 27 nt, Artificial Sequence
  Synthetic oligonucleotide
cagcuucuugcagcgauacagcucaac

SEQ ID NO: 1857 - RNA, 27 nt, Artificial Sequence
  Synthetic oligonucleotide
gcuucuugcagcgauacagcucagaaa

SEQ ID NO: 1858 - RNA, 27 nt, Artificial Sequence
  Synthetic oligonucleotide
ccacaaagcagugaauuuauuggagac

SEQ ID NO: 1859 - RNA, 27 nt, Artificial Sequence
  Synthetic oligonucleotide
guauauuugaaaaaaaaaaaaaguacc

SEQ ID NO: 1860 - RNA, 27 nt, Artificial Sequence
  Synthetic oligonucleotide
ugugaggauuuuuauugauuggggaca

SEQ ID NO: 1861 - RNA, 27 nt, Artificial Sequence
  Synthetic oligonucleotide
cgcuauugauuuuuacuucaaugggac

SEQ ID NO: 1862 - RNA, 27 nt, Artificial Sequence
  Synthetic oligonucleotide
aaggaagaagcuugcugguagcacuca

SEQ ID NO: 1863 - RNA, 27 nt, Artificial Sequence
  Synthetic oligonucleotide
aggaagaagcuugcugguagcacuuaa

SEQ ID NO: 1864 - RNA, 27 nt, Artificial Sequence
  Synthetic oligonucleotide
ggaagaagcuugcugguagcacuugac

SEQ ID NO: 1865 - RNA, 27 nt, Artificial Sequence
  Synthetic oligonucleotide
gaagaagcuugcugguagcacuugccc

SEQ ID NO: 1866 - RNA, 27 nt, Artificial Sequence
  Synthetic oligonucleotide
aagaagcuugcugguagcacuugcuca

SEQ ID NO: 1867 - RNA, 27 nt, Artificial Sequence
  Synthetic oligonucleotide
gaagcuugcugguagcacuugcuacaa

SEQ ID NO: 1868 - RNA, 27 nt, Artificial Sequence
  Synthetic oligonucleotide
aagcuugcugguagcacuugcuaccac

SEQ ID NO: 1869 - RNA, 27 nt, Artificial Sequence
  Synthetic oligonucleotide
agcuugcugguagcacuugcuacccca

SEQ ID NO: 1870 - RNA, 27 nt, Artificial Sequence
  Synthetic oligonucleotide
gcuugcugguagcacuugcuacccuac

SEQ ID NO: 1871 - RNA, 27 nt, Artificial Sequence
  Synthetic oligonucleotide
cuugcugguagcacuugcuacccugca

SEQ ID NO: 1872 - RNA, 27 nt, Artificial Sequence
  Synthetic oligonucleotide
uugcugguagcacuugcuacccugaac

SEQ ID NO: 1873 - RNA, 27 nt, Artificial Sequence
  Synthetic oligonucleotide
ggaugcuugauuccagugguucugccc

SEQ ID NO: 1874 - RNA, 27 nt, Artificial Sequence
  Synthetic oligonucleotide
gaugcuugauuccagugguucugcuca

SEQ ID NO: 1875 - RNA, 27 nt, Artificial Sequence
  Synthetic oligonucleotide
agcaggccggaucgguacuguaucaca

SEQ ID NO: 1876 - RNA, 27 nt, Artificial Sequence
  Synthetic oligonucleotide
gccggaucgguacuguaucaagucaca

SEQ ID NO: 1877 - RNA, 27 nt, Artificial Sequence
  Synthetic oligonucleotide
uccuuagacuuacuuuuguaaaaauac

SEQ ID NO: 1878 - RNA, 27 nt, Artificial Sequence
  Synthetic oligonucleotide
cugucuugcugucaugaaaucagcaca

SEQ ID NO: 1879 - RNA, 27 nt, Artificial Sequence
  Synthetic oligonucleotide
ccuaaggauagcaccgcuuuuguucca

SEQ ID NO: 1880 - RNA, 27 nt, Artificial Sequence
  Synthetic oligonucleotide
uaaggauagcaccgcuuuuguucucaa

SEQ ID NO: 1881 - RNA, 27 nt, Artificial Sequence
  Synthetic oligonucleotide
aaggauagcaccgcuuuuguucucgac

SEQ ID NO: 1882 - RNA, 27 nt, Artificial Sequence
  Synthetic oligonucleotide
aggauagcaccgcuuuuguucucgccc

SEQ ID NO: 1883 - RNA, 27 nt, Artificial Sequence
  Synthetic oligonucleotide
ggauagcaccgcuuuuguucucgcacc

SEQ ID NO: 1884 - RNA, 27 nt, Artificial Sequence
  Synthetic oligonucleotide
gauagcaccgcuuuuguucucgcaacc

SEQ ID NO: 1885 - RNA, 27 nt, Artificial Sequence
  Synthetic oligonucleotide
auagcaccgcuuuuguucucgcaaacc

SEQ ID NO: 1886 - RNA, 27 nt, Artificial Sequence
  Synthetic oligonucleotide
uagcaccgcuuuuguucucgcaaaaca

SEQ ID NO: 1887 - RNA, 27 nt, Artificial Sequence
  Synthetic oligonucleotide
agcaccgcuuuuguucucgcaaaaaaa

SEQ ID NO: 1888 - RNA, 27 nt, Artificial Sequence
  Synthetic oligonucleotide
accgcuuuuguucucgcaaaaacgucc

SEQ ID NO: 1889 - RNA, 27 nt, Artificial Sequence
  Synthetic oligonucleotide
ccgcuuuuguucucgcaaaaacguaca

SEQ ID NO: 1890 - RNA, 27 nt, Artificial Sequence
  Synthetic oligonucleotide
cgcuuuuguucucgcaaaaacguauac

SEQ ID NO: 1891 - RNA, 27 nt, Artificial Sequence
  Synthetic oligonucleotide
gcuuuuguucucgcaaaaacguaucca

SEQ ID NO: 1892 - RNA, 27 nt, Artificial Sequence
  Synthetic oligonucleotide
uguucucgcaaaaacguaucuccuacc

SEQ ID NO: 1893 - RNA, 27 nt, Artificial Sequence
  Synthetic oligonucleotide
caaaauuaguuuguguuacuuauggcc

SEQ ID NO: 1894 - RNA, 27 nt, Artificial Sequence
  Synthetic oligonucleotide
acuuauggaagauaguuuucuccuucc

SEQ ID NO: 1895 - RNA, 27 nt, Artificial Sequence
  Synthetic oligonucleotide
cuucaaaagcuuuuuacucaaagagcc

SEQ ID NO: 1896 - RNA, 27 nt, Artificial Sequence
  Synthetic oligonucleotide
aaacuaggguuugaaauugauaaugac

SEQ ID NO: 1897 - RNA, 27 nt, Artificial Sequence
  Synthetic oligonucleotide
ccuaaaauaauuucucuacaauuggcc

SEQ ID NO: 1898 - RNA, 27 nt, Artificial Sequence
  Synthetic oligonucleotide
aacagcaguccuuuguaaacagugucc

SEQ ID NO: 1899 - RNA, 27 nt, Artificial Sequence
  Synthetic oligonucleotide
uccaauuuaucaaggaagaaaugguca

SEQ ID NO: 1900 - RNA, 27 nt, Artificial Sequence
  Synthetic oligonucleotide
cauacaaaauguuccuuuugcuuuucc

SEQ ID NO: 1901 - RNA, 27 nt, Artificial Sequence
  Synthetic oligonucleotide
auguuccuuuugcuuuuaaaguaaucc

SEQ ID NO: 1902 - RNA, 27 nt, Artificial Sequence
  Synthetic oligonucleotide
uguuccuuuugcuuuuaaaguaauucc

SEQ ID NO: 1903 - RNA, 27 nt, Artificial Sequence
  Synthetic oligonucleotide
uuuugcuuuuaaaguaauuuuugacca

SEQ ID NO: 1904 - RNA, 27 nt, Artificial Sequence
  Synthetic oligonucleotide
uuguuaagaaaguauuugauuuuugca

SEQ ID NO: 1905 - RNA, 27 nt, Artificial Sequence
  Synthetic oligonucleotide
auuuggaaauuaccuaugugcagagac

SEQ ID NO: 1906 - RNA, 27 nt, Artificial Sequence
  Synthetic oligonucleotide
uuuggaaauuaccuaugugcagaggcc

SEQ ID NO: 1907 - RNA, 27 nt, Artificial Sequence
  Synthetic oligonucleotide
aucuuuccuucuuaaagaccauccaaa

SEQ ID NO: 1908 - RNA, 27 nt, Artificial Sequence
  Synthetic oligonucleotide
ucuuuccuucuuaaagaccauccagac

SEQ ID NO: 1909 - RNA, 27 nt, Artificial Sequence
  Synthetic oligonucleotide
cuuuccuucuuaaagaccauccaggca

SEQ ID NO: 1910 - RNA, 27 nt, Artificial Sequence
  Synthetic oligonucleotide
uuuccuucuuaaagaccauccaggaaa

SEQ ID NO: 1911 - RNA, 27 nt, Artificial Sequence
  Synthetic oligonucleotide
uuccuucuuaaagaccauccaggagac

SEQ ID NO: 1912 - RNA, 27 nt, Artificial Sequence
  Synthetic oligonucleotide
uccuucuuaaagaccauccaggaggca

SEQ ID NO: 1913 - RNA, 27 nt, Artificial Sequence
  Synthetic oligonucleotide
ccuucuuaaagaccauccaggagguaa

SEQ ID NO: 1914 - RNA, 27 nt, Artificial Sequence
  Synthetic oligonucleotide
cuucuuaaagaccauccaggaggugaa

SEQ ID NO: 1915 - RNA, 27 nt, Artificial Sequence
  Synthetic oligonucleotide
uucuuaaagaccauccaggagguggac

SEQ ID NO: 1916 - RNA, 27 nt, Artificial Sequence
  Synthetic oligonucleotide
ucuuaaagaccauccaggagguggcca

SEQ ID NO: 1917 - RNA, 27 nt, Artificial Sequence
  Synthetic oligonucleotide
cuuaaagaccauccaggagguggcuaa

SEQ ID NO: 1918 - RNA, 27 nt, Artificial Sequence
  Synthetic oligonucleotide
uuaaagaccauccaggagguggcugac

SEQ ID NO: 1919 - RNA, 27 nt, Artificial Sequence
  Synthetic oligonucleotide
uaaagaccauccaggagguggcuggcc

SEQ ID NO: 1920 - RNA, 27 nt, Artificial Sequence
  Synthetic oligonucleotide
aaagaccauccaggagguggcuggucc

SEQ ID NO: 1921 - RNA, 27 nt, Artificial Sequence
  Synthetic oligonucleotide
agugugauccaagcugucccaauggac

SEQ ID NO: 1922 - RNA, 27 nt, Artificial Sequence
  Synthetic oligonucleotide
gugugauccaagcugucccaaugggca

SEQ ID NO: 1923 - RNA, 27 nt, Artificial Sequence
  Synthetic oligonucleotide
ugugauccaagcugucccaaugggaaa

SEQ ID NO: 1924 - RNA, 27 nt, Artificial Sequence
  Synthetic oligonucleotide
gugauccaagcugucccaaugggagac

SEQ ID NO: 1925 - RNA, 27 nt, Artificial Sequence
  Synthetic oligonucleotide
ugauccaagcugucccaaugggagcca

SEQ ID NO: 1926 - RNA, 27 nt, Artificial Sequence
  Synthetic oligonucleotide
gcaggagaggagaacugccagaaacca

SEQ ID NO: 1927 - RNA, 27 nt, Artificial Sequence
  Synthetic oligonucleotide
caggagaggagaacugccagaaacuac

SEQ ID NO: 1928 - RNA, 27 nt, Artificial Sequence
  Synthetic oligonucleotide
aggagaggagaacugccagaaacugca

SEQ ID NO: 1929 - RNA, 27 nt, Artificial Sequence
  Synthetic oligonucleotide
ggagaggagaacugccagaaacugaaa

SEQ ID NO: 1930 - RNA, 27 nt, Artificial Sequence
  Synthetic oligonucleotide
acugaccaaaaucaucugugcccagac

SEQ ID NO: 1931 - RNA, 27 nt, Artificial Sequence
  Synthetic oligonucleotide
cugaccaaaaucaucugugcccagcca

SEQ ID NO: 1932 - RNA, 27 nt, Artificial Sequence
  Synthetic oligonucleotide
ugaccaaaaucaucugugcccagcaac

SEQ ID NO: 1933 - RNA, 27 nt, Artificial Sequence
  Synthetic oligonucleotide
gaccaaaaucaucugugcccagcagca

SEQ ID NO: 1934 - RNA, 27 nt, Artificial Sequence
  Synthetic oligonucleotide
accaaaaucaucugugcccagcaguaa

SEQ ID NO: 1935 - RNA, 27 nt, Artificial Sequence
  Synthetic oligonucleotide
ccaaaaucaucugugcccagcagugac

SEQ ID NO: 1936 - RNA, 27 nt, Artificial Sequence
  Synthetic oligonucleotide
caaaaucaucugugcccagcagugcca

SEQ ID NO: 1937 - RNA, 27 nt, Artificial Sequence
  Synthetic oligonucleotide
cccagugacugcugccacaaccaguac

SEQ ID NO: 1938 - RNA, 27 nt, Artificial Sequence
  Synthetic oligonucleotide
ccagugacugcugccacaaccagugca

SEQ ID NO: 1939 - RNA, 27 nt, Artificial Sequence
  Synthetic oligonucleotide
cagugacugcugccacaaccaguguaa

SEQ ID NO: 1940 - RNA, 27 nt, Artificial Sequence
  Synthetic oligonucleotide
cucacucuccauaaaugcuacgaaucc

SEQ ID NO: 1941 - RNA, 27 nt, Artificial Sequence
  Synthetic oligonucleotide
gguuuuugcugauucaggcuuggccca

SEQ ID NO: 1942 - RNA, 27 nt, Artificial Sequence
  Synthetic oligonucleotide
guuuuugcugauucaggcuuggccuac

SEQ ID NO: 1943 - RNA, 27 nt, Artificial Sequence
  Synthetic oligonucleotide
uuuuugcugauucaggcuuggccugcc

SEQ ID NO: 1944 - RNA, 27 nt, Artificial Sequence
  Synthetic oligonucleotide
uuuugcugauucaggcuuggccugacc

SEQ ID NO: 1945 - RNA, 27 nt, Artificial Sequence
  Synthetic oligonucleotide
uuugcugauucaggcuuggccugaacc

SEQ ID NO: 1946 - RNA, 27 nt, Artificial Sequence
  Synthetic oligonucleotide
uugcugauucaggcuuggccugaaaca

SEQ ID NO: 1947 - RNA, 27 nt, Artificial Sequence
  Synthetic oligonucleotide
ugcugauucaggcuuggccugaaaaac

SEQ ID NO: 1948 - RNA, 27 nt, Artificial Sequence
  Synthetic oligonucleotide
gcugauucaggcuuggccugaaaacca

SEQ ID NO: 1949 - RNA, 27 nt, Artificial Sequence
  Synthetic oligonucleotide
ccaagcaacauggucaguuuucucuca

SEQ ID NO: 1950 - RNA, 27 nt, Artificial Sequence
  Synthetic oligonucleotide
caagcaacauggucaguuuucucuuaa

SEQ ID NO: 1951 - RNA, 27 nt, Artificial Sequence
  Synthetic oligonucleotide
aagcaacauggucaguuuucucuugac

SEQ ID NO: 1952 - RNA, 27 nt, Artificial Sequence
  Synthetic oligonucleotide
uacaauaaacuggaaaaaacuguuuaa

SEQ ID NO: 1953 - RNA, 27 nt, Artificial Sequence
  Synthetic oligonucleotide
cucaggccaugaacaucaccugcacca

SEQ ID NO: 1954 - RNA, 27 nt, Artificial Sequence
  Synthetic oligonucleotide
ucaggccaugaacaucaccugcacaaa

SEQ ID NO: 1955 - RNA, 27 nt, Artificial Sequence
  Synthetic oligonucleotide
guauccagugugcccacuacauugaaa

SEQ ID NO: 1956 - RNA, 27 nt, Artificial Sequence
  Synthetic oligonucleotide
uauccagugugcccacuacauugacaa

SEQ ID NO: 1957 - RNA, 27 nt, Artificial Sequence
  Synthetic oligonucleotide
auccagugugcccacuacauugacgaa

SEQ ID NO: 1958 - RNA, 27 nt, Artificial Sequence
  Synthetic oligonucleotide
uccagugugcccacuacauugacggaa

SEQ ID NO: 1959 - RNA, 27 nt, Artificial Sequence
  Synthetic oligonucleotide
ccagugugcccacuacauugacggcaa

SEQ ID NO: 1960 - RNA, 27 nt, Artificial Sequence
  Synthetic oligonucleotide
cugaauucaaaaagaucaaagugcuaa

SEQ ID NO: 1961 - RNA, 27 nt, Artificial Sequence
  Synthetic oligonucleotide
ugaauucaaaaagaucaaagugcugaa

SEQ ID NO: 1962 - RNA, 27 nt, Artificial Sequence
  Synthetic oligonucleotide
gacucuggaucccagaaggugagaaca

SEQ ID NO: 1963 - RNA, 27 nt, Artificial Sequence
  Synthetic oligonucleotide
acucuggaucccagaaggugagaaaac

SEQ ID NO: 1964 - RNA, 27 nt, Artificial Sequence
  Synthetic oligonucleotide
cucuggaucccagaaggugagaaagcc

SEQ ID NO: 1965 - RNA, 27 nt, Artificial Sequence
  Synthetic oligonucleotide
ucuggaucccagaaggugagaaagucc

SEQ ID NO: 1966 - RNA, 27 nt, Artificial Sequence
  Synthetic oligonucleotide
cuggaucccagaaggugagaaaguucc

SEQ ID NO: 1967 - RNA, 27 nt, Artificial Sequence
  Synthetic oligonucleotide
uggaucccagaaggugagaaaguuacc

SEQ ID NO: 1968 - RNA, 27 nt, Artificial Sequence
  Synthetic oligonucleotide
ggaucccagaaggugagaaaguuaacc

SEQ ID NO: 1969 - RNA, 27 nt, Artificial Sequence
  Synthetic oligonucleotide
gaucccagaaggugagaaaguuaaacc

SEQ ID NO: 1970 - RNA, 27 nt, Artificial Sequence
  Synthetic oligonucleotide
cgcagcaugucaagaucacagauuuca

SEQ ID NO: 1971 - RNA, 27 nt, Artificial Sequence
  Synthetic oligonucleotide
gcagcaugucaagaucacagauuuuaa

SEQ ID NO: 1972 - RNA, 27 nt, Artificial Sequence
  Synthetic oligonucleotide
cagcaugucaagaucacagauuuugaa

SEQ ID NO: 1973 - RNA, 27 nt, Artificial Sequence
  Synthetic oligonucleotide
agcaugucaagaucacagauuuuggaa

SEQ ID NO: 1974 - RNA, 27 nt, Artificial Sequence
  Synthetic oligonucleotide
gcaugucaagaucacagauuuugggac

SEQ ID NO: 1975 - RNA, 27 nt, Artificial Sequence
  Synthetic oligonucleotide
caugucaagaucacagauuuugggcca

SEQ ID NO: 1976 - RNA, 27 nt, Artificial Sequence
  Synthetic oligonucleotide
augucaagaucacagauuuugggcuaa

SEQ ID NO: 1977 - RNA, 27 nt, Artificial Sequence
  Synthetic oligonucleotide
ugucaagaucacagauuuugggcugaa

SEQ ID NO: 1978 - RNA, 27 nt, Artificial Sequence
  Synthetic oligonucleotide
gucaagaucacagauuuugggcuggaa

SEQ ID NO: 1979 - RNA, 27 nt, Artificial Sequence
  Synthetic oligonucleotide
ucaagaucacagauuuugggcuggcac

SEQ ID NO: 1980 - RNA, 27 nt, Artificial Sequence
  Synthetic oligonucleotide
caagaucacagauuuugggcuggcccc

SEQ ID NO: 1981 - RNA, 27 nt, Artificial Sequence
  Synthetic oligonucleotide
aagaucacagauuuugggcuggccacc

SEQ ID NO: 1982 - RNA, 27 nt, Artificial Sequence
  Synthetic oligonucleotide
agaucacagauuuugggcuggccaaca

SEQ ID NO: 1983 - RNA, 27 nt, Artificial Sequence
  Synthetic oligonucleotide
gaucacagauuuugggcuggccaaaac

SEQ ID NO: 1984 - RNA, 27 nt, Artificial Sequence
  Synthetic oligonucleotide
aucacagauuuugggcuggccaaacca

SEQ ID NO: 1985 - RNA, 27 nt, Artificial Sequence
  Synthetic oligonucleotide
ucacagauuuugggcuggccaaacuaa

SEQ ID NO: 1986 - RNA, 27 nt, Artificial Sequence
  Synthetic oligonucleotide
cacagauuuugggcuggccaaacugac

SEQ ID NO: 1987 - RNA, 27 nt, Artificial Sequence
  Synthetic oligonucleotide
acagauuuugggcuggccaaacugcca

SEQ ID NO: 1988 - RNA, 27 nt, Artificial Sequence
  Synthetic oligonucleotide
cagauuuugggcuggccaaacugcuaa

SEQ ID NO: 1989 - RNA, 27 nt, Artificial Sequence
  Synthetic oligonucleotide
agauuuugggcuggccaaacugcugaa

SEQ ID NO: 1990 - RNA, 27 nt, Artificial Sequence
  Synthetic oligonucleotide
gauuuugggcuggccaaacugcuggac

SEQ ID NO: 1991 - RNA, 27 nt, Artificial Sequence
  Synthetic oligonucleotide
auuuugggcuggccaaacugcugggca

SEQ ID NO: 1992 - RNA, 27 nt, Artificial Sequence
  Synthetic oligonucleotide
uuuugggcuggccaaacugcuggguaa

SEQ ID NO: 1993 - RNA, 27 nt, Artificial Sequence
  Synthetic oligonucleotide
aggcaaagugccuaucaaguggaugaa

SEQ ID NO: 1994 - RNA, 27 nt, Artificial Sequence
  Synthetic oligonucleotide
ggcaaagugccuaucaaguggauggac

SEQ ID NO: 1995 - RNA, 27 nt, Artificial Sequence
  Synthetic oligonucleotide
gcaaagugccuaucaaguggauggccc

SEQ ID NO: 1996 - RNA, 27 nt, Artificial Sequence
  Synthetic oligonucleotide
caaagugccuaucaaguggauggcacc

SEQ ID NO: 1997 - RNA, 27 nt, Artificial Sequence
  Synthetic oligonucleotide
aaagugccuaucaaguggauggcauca

SEQ ID NO: 1998 - RNA, 27 nt, Artificial Sequence
  Synthetic oligonucleotide
aagugccuaucaaguggauggcauuaa

SEQ ID NO: 1999 - RNA, 27 nt, Artificial Sequence
  Synthetic oligonucleotide
agugccuaucaaguggauggcauugac

SEQ ID NO: 2000 - RNA, 27 nt, Artificial Sequence
  Synthetic oligonucleotide
guaccaucgaugucuacaugaucauaa

SEQ ID NO: 2001 - RNA, 27 nt, Artificial Sequence
  Synthetic oligonucleotide
uaccaucgaugucuacaugaucaugac

SEQ ID NO: 2002 - RNA, 27 nt, Artificial Sequence
  Synthetic oligonucleotide
accaucgaugucuacaugaucauggca

SEQ ID NO: 2003 - RNA, 27 nt, Artificial Sequence
  Synthetic oligonucleotide
ccaucgaugucuacaugaucaugguac

SEQ ID NO: 2004 - RNA, 27 nt, Artificial Sequence
  Synthetic oligonucleotide
caucgaugucuacaugaucaugguccc

SEQ ID NO: 2005 - RNA, 27 nt, Artificial Sequence
  Synthetic oligonucleotide
aucgaugucuacaugaucauggucaca

SEQ ID NO: 2006 - RNA, 27 nt, Artificial Sequence
  Synthetic oligonucleotide
ucgaugucuacaugaucauggucaaac

SEQ ID NO: 2007 - RNA, 27 nt, Artificial Sequence
  Synthetic oligonucleotide
cgaugucuacaugaucauggucaagca

SEQ ID NO: 2008 - RNA, 27 nt, Artificial Sequence
  Synthetic oligonucleotide
gaugucuacaugaucauggucaaguaa

SEQ ID NO: 2009 - RNA, 27 nt, Artificial Sequence
  Synthetic oligonucleotide
augucuacaugaucauggucaagugac

SEQ ID NO: 2010 - RNA, 27 nt, Artificial Sequence
  Synthetic oligonucleotide
ugucuacaugaucauggucaagugcca

SEQ ID NO: 2011 - RNA, 27 nt, Artificial Sequence
  Synthetic oligonucleotide
gucuacaugaucauggucaagugcuaa

SEQ ID NO: 2012 - RNA, 27 nt, Artificial Sequence
  Synthetic oligonucleotide
ucuacaugaucauggucaagugcugac

SEQ ID NO: 2013 - RNA, 27 nt, Artificial Sequence
  Synthetic oligonucleotide
cuacaugaucauggucaagugcuggcc

SEQ ID NO: 2014 - RNA, 27 nt, Artificial Sequence
  Synthetic oligonucleotide
uacaugaucauggucaagugcuggaca

SEQ ID NO: 2015 - RNA, 27 nt, Artificial Sequence
  Synthetic oligonucleotide
acaugaucauggucaagugcuggauac

SEQ ID NO: 2016 - RNA, 27 nt, Artificial Sequence
  Synthetic oligonucleotide
caugaucauggucaagugcuggaugcc

SEQ ID NO: 2017 - RNA, 27 nt, Artificial Sequence
  Synthetic oligonucleotide
augaucauggucaagugcuggaugacc

SEQ ID NO: 2018 - RNA, 27 nt, Artificial Sequence
  Synthetic oligonucleotide
ugaucauggucaagugcuggaugauca

SEQ ID NO: 2019 - RNA, 27 nt, Artificial Sequence
  Synthetic oligonucleotide
gaucauggucaagugcuggaugauaac

SEQ ID NO: 2020 - RNA, 27 nt, Artificial Sequence
  Synthetic oligonucleotide
aucauggucaagugcuggaugauagca

SEQ ID NO: 2021 - RNA, 27 nt, Artificial Sequence
  Synthetic oligonucleotide
ucauggucaagugcuggaugauagaaa

SEQ ID NO: 2022 - RNA, 27 nt, Artificial Sequence
  Synthetic oligonucleotide
cauggucaagugcuggaugauagacaa

SEQ ID NO: 2023 - RNA, 27 nt, Artificial Sequence
  Synthetic oligonucleotide
auggucaagugcuggaugauagacgac

SEQ ID NO: 2024 - RNA, 27 nt, Artificial Sequence
  Synthetic oligonucleotide
uggucaagugcuggaugauagacgcca

SEQ ID NO: 2025 - RNA, 27 nt, Artificial Sequence
  Synthetic oligonucleotide
ggucaagugcuggaugauagacgcaac

SEQ ID NO: 2026 - RNA, 27 nt, Artificial Sequence
  Synthetic oligonucleotide
ucgaauucuccaaaauggcccgagaaa

SEQ ID NO: 2027 - RNA, 27 nt, Artificial Sequence
  Synthetic oligonucleotide
cgaauucuccaaaauggcccgagacaa

SEQ ID NO: 2028 - RNA, 27 nt, Artificial Sequence
  Synthetic oligonucleotide
gggaugaaagaaugcauuugccaagca

SEQ ID NO: 2029 - RNA, 27 nt, Artificial Sequence
  Synthetic oligonucleotide
ggaugaaagaaugcauuugccaaguaa

SEQ ID NO: 2030 - RNA, 27 nt, Artificial Sequence
  Synthetic oligonucleotide
gaugaaagaaugcauuugccaagucac

SEQ ID NO: 2031 - RNA, 27 nt, Artificial Sequence
  Synthetic oligonucleotide
augaaagaaugcauuugccaagucccc

SEQ ID NO: 2032 - RNA, 27 nt, Artificial Sequence
  Synthetic oligonucleotide
ugaaagaaugcauuugccaaguccuca

SEQ ID NO: 2033 - RNA, 27 nt, Artificial Sequence
  Synthetic oligonucleotide
uggacaacccugacuaccagcaggaac

SEQ ID NO: 2034 - RNA, 27 nt, Artificial Sequence
  Synthetic oligonucleotide
ggacaacccugacuaccagcaggaccc

SEQ ID NO: 2035 - RNA, 27 nt, Artificial Sequence
  Synthetic oligonucleotide
gacaacccugacuaccagcaggacuca

SEQ ID NO: 2036 - RNA, 27 nt, Artificial Sequence
  Synthetic oligonucleotide
acaacccugacuaccagcaggacuuac

SEQ ID NO: 2037 - RNA, 27 nt, Artificial Sequence
  Synthetic oligonucleotide
caacccugacuaccagcaggacuuccc

SEQ ID NO: 2038 - RNA, 27 nt, Artificial Sequence
  Synthetic oligonucleotide
aacccugacuaccagcaggacuucucc

SEQ ID NO: 2039 - RNA, 27 nt, Artificial Sequence
  Synthetic oligonucleotide
acccugacuaccagcaggacuucuuca

SEQ ID NO: 2040 - RNA, 27 nt, Artificial Sequence
  Synthetic oligonucleotide
cccugacuaccagcaggacuucuuuaa

SEQ ID NO: 2041 - RNA, 27 nt, Artificial Sequence
  Synthetic oligonucleotide
cagcgcaacgcgcagcagccucccuaa

SEQ ID NO: 2042 - RNA, 27 nt, Artificial Sequence
  Synthetic oligonucleotide
acgcgcagcagccucccuccucuuccc

SEQ ID NO: 2043 - RNA, 27 nt, Artificial Sequence
  Synthetic oligonucleotide
agccucccuccucuucuucccgcacca

SEQ ID NO: 2044 - RNA, 27 nt, Artificial Sequence
  Synthetic oligonucleotide
cucccuccucuucuucccgcacuguaa

SEQ ID NO: 2045 - RNA, 27 nt, Artificial Sequence
  Synthetic oligonucleotide
cccuccucuucuucccgcacugugcaa

SEQ ID NO: 2046 - RNA, 27 nt, Artificial Sequence
  Synthetic oligonucleotide
cuccucuucuucccgcacugugcgcca

SEQ ID NO: 2047 - RNA, 27 nt, Artificial Sequence
  Synthetic oligonucleotide
cucuucuucccgcacugugcgcuccca

SEQ ID NO: 2048 - RNA, 27 nt, Artificial Sequence
  Synthetic oligonucleotide
cuucuucccgcacugugcgcuccucac

SEQ ID NO: 2049 - RNA, 27 nt, Artificial Sequence
  Synthetic oligonucleotide
uucuucccgcacugugcgcuccuccca

SEQ ID NO: 2050 - RNA, 27 nt, Artificial Sequence
  Synthetic oligonucleotide
ucuucccgcacugugcgcuccuccuaa

SEQ ID NO: 2051 - RNA, 27 nt, Artificial Sequence
  Synthetic oligonucleotide
cugugcgcuccuccugggcuagggcac

SEQ ID NO: 2052 - RNA, 27 nt, Artificial Sequence
  Synthetic oligonucleotide
ugcgcuccuccugggcuagggcgucca

SEQ ID NO: 2053 - RNA, 27 nt, Artificial Sequence
  Synthetic oligonucleotide
cacacugcugguguugcugaccgcgac

SEQ ID NO: 2054 - RNA, 27 nt, Artificial Sequence
  Synthetic oligonucleotide
acacugcugguguugcugaccgcgcca

SEQ ID NO: 2055 - RNA, 27 nt, Artificial Sequence
  Synthetic oligonucleotide
cacugcugguguugcugaccgcgcuac

SEQ ID NO: 2056 - RNA, 27 nt, Artificial Sequence
  Synthetic oligonucleotide
acugcugguguugcugaccgcgcucca

SEQ ID NO: 2057 - RNA, 27 nt, Artificial Sequence
  Synthetic oligonucleotide
cugcugguguugcugaccgcgcucuaa

SEQ ID NO: 2058 - RNA, 27 nt, Artificial Sequence
  Synthetic oligonucleotide
ugcugguguugcugaccgcgcucugaa

SEQ ID NO: 2059 - RNA, 27 nt, Artificial Sequence
  Synthetic oligonucleotide
gcugguguugcugaccgcgcucugcaa

SEQ ID NO: 2060 - RNA, 27 nt, Artificial Sequence
  Synthetic oligonucleotide
ugguguugcugaccgcgcucugcgcaa

SEQ ID NO: 2061 - RNA, 27 nt, Artificial Sequence
  Synthetic oligonucleotide
gguguugcugaccgcgcucugcgccaa

SEQ ID NO: 2062 - RNA, 27 nt, Artificial Sequence
  Synthetic oligonucleotide
guguugcugaccgcgcucugcgccgac

SEQ ID NO: 2063 - RNA, 27 nt, Artificial Sequence
  Synthetic oligonucleotide
uguugcugaccgcgcucugcgccgcca

SEQ ID NO: 2064 - RNA, 27 nt, Artificial Sequence
  Synthetic oligonucleotide
ugcugaccgcgcucugcgccgcaggca

SEQ ID NO: 2065 - RNA, 27 nt, Artificial Sequence
  Synthetic oligonucleotide
gcugaccgcgcucugcgccgcagguaa

SEQ ID NO: 2066 - RNA, 27 nt, Artificial Sequence
  Synthetic oligonucleotide
uccugauuggugcugugcgauucagac

SEQ ID NO: 2067 - RNA, 27 nt, Artificial Sequence
  Synthetic oligonucleotide
ccugauuggugcugugcgauucagccc

SEQ ID NO: 2068 - RNA, 27 nt, Artificial Sequence
  Synthetic oligonucleotide
cugauuggugcugugcgauucagcaca

SEQ ID NO: 2069 - RNA, 27 nt, Artificial Sequence
  Synthetic oligonucleotide
gauuggugcugugcgauucagcaaccc

SEQ ID NO: 2070 - RNA, 27 nt, Artificial Sequence
  Synthetic oligonucleotide
uuggugcugugcgauucagcaacaaaa

SEQ ID NO: 2071 - RNA, 27 nt, Artificial Sequence
  Synthetic oligonucleotide
uggugcugugcgauucagcaacaacaa

SEQ ID NO: 2072 - RNA, 27 nt, Artificial Sequence
  Synthetic oligonucleotide
uccaagcugucccaauggaagcugcca

SEQ ID NO: 2073 - RNA, 27 nt, Artificial Sequence
  Synthetic oligonucleotide
cugugcccagcaauguucccaucgcca

SEQ ID NO: 2074 - RNA, 27 nt, Artificial Sequence
  Synthetic oligonucleotide
ggaaguacagcuuuggugccaccugca

SEQ ID NO: 2075 - RNA, 27 nt, Artificial Sequence
  Synthetic oligonucleotide
cugucgcaaaguuuguaauggcauaaa

SEQ ID NO: 2076 - RNA, 27 nt, Artificial Sequence
  Synthetic oligonucleotide
gggauucuuucacgcgcacuccuccca

SEQ ID NO: 2077 - RNA, 27 nt, Artificial Sequence
  Synthetic oligonucleotide
aacaggcuuuuugcugauucaggcuca

SEQ ID NO: 2078 - RNA, 27 nt, Artificial Sequence
  Synthetic oligonucleotide
uucaggcuuggccugauaacuggacca

SEQ ID NO: 2079 - RNA, 27 nt, Artificial Sequence
  Synthetic oligonucleotide
caggcuuggccugauaacuggacugca

SEQ ID NO: 2080 - RNA, 27 nt, Artificial Sequence
  Synthetic oligonucleotide
gcuuggccugauaacuggacugaccca

SEQ ID NO: 2081 - RNA, 27 nt, Artificial Sequence
  Synthetic oligonucleotide
acgccaacuguaccuauggaugugcca

SEQ ID NO: 2082 - RNA, 27 nt, Artificial Sequence
  Synthetic oligonucleotide
cacugggauuguggguggccuccuccc

SEQ ID NO: 2083 - RNA, 27 nt, Artificial Sequence
  Synthetic oligonucleotide
ggugguggcccuugggauuggccuacc

SEQ ID NO: 2084 - RNA, 27 nt, Artificial Sequence
  Synthetic oligonucleotide
gauuggccuauucaugcgaagacguac

SEQ ID NO: 2085 - RNA, 27 nt, Artificial Sequence
  Synthetic oligonucleotide
cgccgccugcuucaagagagagagcca

SEQ ID NO: 2086 - RNA, 27 nt, Artificial Sequence
  Synthetic oligonucleotide
gccgccugcuucaagagagagagcuaa

SEQ ID NO: 2087 - RNA, 27 nt, Artificial Sequence
  Synthetic oligonucleotide
ccgccugcuucaagagagagagcucac

SEQ ID NO: 2088 - RNA, 27 nt, Artificial Sequence
  Synthetic oligonucleotide
guggacaacccucauguaugccgccca

SEQ ID NO: 2089 - RNA, 27 nt, Artificial Sequence
  Synthetic oligonucleotide
uguaugccgccuccugggcaucuguac

SEQ ID NO: 2090 - RNA, 27 nt, Artificial Sequence
  Synthetic oligonucleotide
cagcucaugcccuacgguugccuccca

SEQ ID NO: 2091 - RNA, 27 nt, Artificial Sequence
  Synthetic oligonucleotide
agcucaugcccuacgguugccuccuaa

SEQ ID NO: 2092 - RNA, 27 nt, Artificial Sequence
  Synthetic oligonucleotide
gaucggcguuuggugcaccgugacuca

SEQ ID NO: 2093 - RNA, 27 nt, Artificial Sequence
  Synthetic oligonucleotide
gcguuuggugcaccgugacuuggcaaa

SEQ ID NO: 2094 - RNA, 27 nt, Artificial Sequence
  Synthetic oligonucleotide
uugggcuggccaaacugcuuggugcca

SEQ ID NO: 2095 - RNA, 27 nt, Artificial Sequence
  Synthetic oligonucleotide
ugggcuggccaaacugcuuggugcuac

SEQ ID NO: 2096 - RNA, 27 nt, Artificial Sequence
  Synthetic oligonucleotide
ggcuggccaaacugcuuggugcugaca

SEQ ID NO: 2097 - RNA, 27 nt, Artificial Sequence
  Synthetic oligonucleotide
gcuggccaaacugcuuggugcugaaac

SEQ ID NO: 2098 - RNA, 27 nt, Artificial Sequence
  Synthetic oligonucleotide
gucaagugcuggaugauagaugcugcc

SEQ ID NO: 2099 - RNA, 27 nt, Artificial Sequence
  Synthetic oligonucleotide
ucaagugcuggaugauagaugcugacc

SEQ ID NO: 2100 - RNA, 27 nt, Artificial Sequence
  Synthetic oligonucleotide
caagugcuggaugauagaugcugauca

SEQ ID NO: 2101 - RNA, 27 nt, Artificial Sequence
  Synthetic oligonucleotide
aagugcuggaugauagaugcugauaaa

SEQ ID NO: 2102 - RNA, 27 nt, Artificial Sequence
  Synthetic oligonucleotide
agugcuggaugauagaugcugauagaa

SEQ ID NO: 2103 - RNA, 27 nt, Artificial Sequence
  Synthetic oligonucleotide
gugcuggaugauagaugcugauagcaa

SEQ ID NO: 2104 - RNA, 27 nt, Artificial Sequence
  Synthetic oligonucleotide
ugcuggaugauagaugcugauagccaa

SEQ ID NO: 2105 - RNA, 27 nt, Artificial Sequence
  Synthetic oligonucleotide
gcuggaugauagaugcugauagccgaa

SEQ ID NO: 2106 - RNA, 27 nt, Artificial Sequence
  Synthetic oligonucleotide
cuggaugauagaugcugauagccgcaa

SEQ ID NO: 2107 - RNA, 27 nt, Artificial Sequence
  Synthetic oligonucleotide
uggaugauagaugcugauagccgccac

SEQ ID NO: 2108 - RNA, 27 nt, Artificial Sequence
  Synthetic oligonucleotide
augauagaugcugauagccgcccaaca

SEQ ID NO: 2109 - RNA, 27 nt, Artificial Sequence
  Synthetic oligonucleotide
gauagaugcugauagccgcccaaagcc

SEQ ID NO: 2110 - RNA, 27 nt, Artificial Sequence
  Synthetic oligonucleotide
gagcugccgugucaaagaagacgcccc

SEQ ID NO: 2111 - RNA, 27 nt, Artificial Sequence
  Synthetic oligonucleotide
agcugccgugucaaagaagacgccuca

SEQ ID NO: 2112 - RNA, 27 nt, Artificial Sequence
  Synthetic oligonucleotide
aagacgccuucuugcagcgguacagac

SEQ ID NO: 2113 - RNA, 27 nt, Artificial Sequence
  Synthetic oligonucleotide
agacgccuucuugcagcgguacagcca

SEQ ID NO: 2114 - RNA, 27 nt, Artificial Sequence
  Synthetic oligonucleotide
gacgccuucuugcagcgguacagcuaa

SEQ ID NO: 2115 - RNA, 27 nt, Artificial Sequence
  Synthetic oligonucleotide
acgccuucuugcagcgguacagcucaa

SEQ ID NO: 2116 - RNA, 27 nt, Artificial Sequence
  Synthetic oligonucleotide
cgccuucuugcagcgguacagcuccac

SEQ ID NO: 2117 - RNA, 27 nt, Artificial Sequence
  Synthetic oligonucleotide
gccuucuugcagcgguacagcuccgca

SEQ ID NO: 2118 - RNA, 27 nt, Artificial Sequence
  Synthetic oligonucleotide
ccuucuugcagcgguacagcuccgaaa

SEQ ID NO: 2119 - RNA, 27 nt, Artificial Sequence
  Synthetic oligonucleotide
gacuggcuuuaaagcauaacucugaca

SEQ ID NO: 2120 - RNA, 27 nt, Artificial Sequence
  Synthetic oligonucleotide
aagugggccucucuccugaugcacucc

SEQ ID NO: 2121 - RNA, 27 nt, Artificial Sequence
  Synthetic oligonucleotide
agugggccucucuccugaugcacuuca

SEQ ID NO: 2122 - RNA, 27 nt, Artificial Sequence
  Synthetic oligonucleotide
gugggccucucuccugaugcacuuuaa

SEQ ID NO: 2123 - RNA, 27 nt, Artificial Sequence
  Synthetic oligonucleotide
ugggccucucuccugaugcacuuugaa

SEQ ID NO: 2124 - RNA, 27 nt, Artificial Sequence
  Synthetic oligonucleotide
gccucucuccugaugcacuuugggaca

SEQ ID NO: 2125 - RNA, 27 nt, Artificial Sequence
  Synthetic oligonucleotide
gauugaugcacucuuguagucugguca

SEQ ID NO: 2126 - RNA, 27 nt, Artificial Sequence
  Synthetic oligonucleotide
uagacuuccuucuauguuuucuguuca

SEQ ID NO: 2127 - RNA, 27 nt, Artificial Sequence
  Synthetic oligonucleotide
cuucuauguuuucuguuucauuguucc

SEQ ID NO: 2128 - RNA, 27 nt, Artificial Sequence
  Synthetic oligonucleotide
uauguuuuucuuccugguaaacugcca

SEQ ID NO: 2129 - RNA, 27 nt, Artificial Sequence
  Synthetic oligonucleotide
auguuuuucuuccugguaaacugcaaa

SEQ ID NO: 2130 - RNA, 27 nt, Artificial Sequence
  Synthetic oligonucleotide
uguuuuucuuccugguaaacugcagaa

SEQ ID NO: 2131 - RNA, 27 nt, Artificial Sequence
  Synthetic oligonucleotide
uuucuuccugguaaacugcagccaaca

SEQ ID NO: 2132 - RNA, 27 nt, Artificial Sequence
  Synthetic oligonucleotide
uucgaucuuccuaaugcugugaccccc

SEQ ID NO: 2133 - RNA, 27 nt, Artificial Sequence
  Synthetic oligonucleotide
ucgaucuuccuaaugcugugacccucc

SEQ ID NO: 2134 - RNA, 27 nt, Artificial Sequence
  Synthetic oligonucleotide
uuguugcuacuucauaacuguaaaucc

SEQ ID NO: 2135 - RNA, 27 nt, Artificial Sequence
  Synthetic oligonucleotide
gcuugcagcauccucugguuuccuaca

SEQ ID NO: 2136 - RNA, 27 nt, Artificial Sequence
  Synthetic oligonucleotide
cguugcaagccacucuaacuguagccc

SEQ ID NO: 2137 - RNA, 27 nt, Artificial Sequence
  Synthetic oligonucleotide
ggcgcagcgcggccgcagcagccuccg

SEQ ID NO: 2138 - RNA, 27 nt, Artificial Sequence
  Synthetic oligonucleotide
gcgcagcgcggccgcagcagccuccgc

SEQ ID NO: 2139 - RNA, 27 nt, Artificial Sequence
  Synthetic oligonucleotide
gcagcgcggccgcagcagccuccgccc

SEQ ID NO: 2140 - RNA, 27 nt, Artificial Sequence
  Synthetic oligonucleotide
cagcgcuccuggcgcugcuggcugcgc

SEQ ID NO: 2141 - RNA, 27 nt, Artificial Sequence
  Synthetic oligonucleotide
gcgcuccuggcgcugcuggcugcgcuc

SEQ ID NO: 2142 - RNA, 27 nt, Artificial Sequence
  Synthetic oligonucleotide
gcuccuggcgcugcuggcugcgcucug

SEQ ID NO: 2143 - RNA, 27 nt, Artificial Sequence
  Synthetic oligonucleotide
caguugggcacuuuugaagaucauuuu

SEQ ID NO: 2144 - RNA, 27 nt, Artificial Sequence
  Synthetic oligonucleotide
ugggaauuuggaaauuaccuaugugca

SEQ ID NO: 2145 - RNA, 27 nt, Artificial Sequence
  Synthetic oligonucleotide
aauuaugaucuuuccuucuuaaagacc

SEQ ID NO: 2146 - RNA, 27 nt, Artificial Sequence
  Synthetic oligonucleotide
guggcugguuauguccucauugcccuc

SEQ ID NO: 2147 - RNA, 27 nt, Artificial Sequence
  Synthetic oligonucleotide
ugcccaugagaaauuuacaggaaaucc

SEQ ID NO: 2148 - RNA, 27 nt, Artificial Sequence
  Synthetic oligonucleotide
ccugcauggcgccgugcgguucagcaa

SEQ ID NO: 2149 - RNA, 27 nt, Artificial Sequence
  Synthetic oligonucleotide
uggcgccgugcgguucagcaacaaccc

SEQ ID NO: 2150 - RNA, 27 nt, Artificial Sequence
  Synthetic oligonucleotide
uggcgccgugcgguucagcaacaaccc

SEQ ID NO: 2151 - RNA, 27 nt, Artificial Sequence
  Synthetic oligonucleotide
gcgccgugcgguucagcaacaacccug

SEQ ID NO: 2152 - RNA, 27 nt, Artificial Sequence
  Synthetic oligonucleotide
cgccgugcgguucagcaacaacccugc

SEQ ID NO: 2153 - RNA, 27 nt, Artificial Sequence
  Synthetic oligonucleotide
cagcugccaaaagugugauccaagcug

SEQ ID NO: 2154 - RNA, 27 nt, Artificial Sequence
  Synthetic oligonucleotide
aucugugcccagcagugcuccgggcgc

SEQ ID NO: 2155 - RNA, 27 nt, Artificial Sequence
  Synthetic oligonucleotide
cugugcccagcagugcuccgggcgcug

SEQ ID NO: 2156 - RNA, 27 nt, Artificial Sequence
  Synthetic oligonucleotide
gugcuccgggcgcugccguggcaaguc

SEQ ID NO: 2157 - RNA, 27 nt, Artificial Sequence
  Synthetic oligonucleotide
gagagcgacugccuggucugccgcaaa

SEQ ID NO: 2158 - RNA, 27 nt, Artificial Sequence
  Synthetic oligonucleotide
cugccuggucugccgcaaauuccgaga

SEQ ID NO: 2159 - RNA, 27 nt, Artificial Sequence
  Synthetic oligonucleotide
gacagaucacggcucgugcguccgagc

SEQ ID NO: 2160 - RNA, 27 nt, Artificial Sequence
  Synthetic oligonucleotide
ccgcaaaguguguaacggaauagguau

SEQ ID NO: 2161 - RNA, 27 nt, Artificial Sequence
  Synthetic oligonucleotide
cggaauagguauuggugaauuuaaaga

SEQ ID NO: 2162 - RNA, 27 nt, Artificial Sequence
  Synthetic oligonucleotide
cuacgaauauuaaacacuucaaaaacu

SEQ ID NO: 2163 - RNA, 27 nt, Artificial Sequence
  Synthetic oligonucleotide
ccacaggaacuggauauucugaaaacc

SEQ ID NO: 2164 - RNA, 27 nt, Artificial Sequence
  Synthetic oligonucleotide
cacaggguuuuugcugauucaggcuug

SEQ ID NO: 2165 - RNA, 27 nt, Artificial Sequence
  Synthetic oligonucleotide
uucaggaaacaaaaauuugugcuaugc

SEQ ID NO: 2166 - RNA, 27 nt, Artificial Sequence
  Synthetic oligonucleotide
gugcuaugcaaauacaauaaacuggaa

SEQ ID NO: 2167 - RNA, 27 nt, Artificial Sequence
  Synthetic oligonucleotide
ccggucagaaaaccaaaauuauaagca

SEQ ID NO: 2168 - RNA, 27 nt, Artificial Sequence
  Synthetic oligonucleotide
cugcgucucuugccggaaugucagccg

SEQ ID NO: 2169 - RNA, 27 nt, Artificial Sequence
  Synthetic oligonucleotide
gggcccuccucuugcugcugguggugg

SEQ ID NO: 2170 - RNA, 27 nt, Artificial Sequence
  Synthetic oligonucleotide
ggcccuccucuugcugcuggugguggc

SEQ ID NO: 2171 - RNA, 27 nt, Artificial Sequence
  Synthetic oligonucleotide
cuccucuugcugcuggugguggcccug

SEQ ID NO: 2172 - RNA, 27 nt, Artificial Sequence
  Synthetic oligonucleotide
uccucuugcugcuggugguggcccugg

SEQ ID NO: 2173 - RNA, 27 nt, Artificial Sequence
  Synthetic oligonucleotide
cggaagcgcacgcugcggaggcugcug

SEQ ID NO: 2174 - RNA, 27 nt, Artificial Sequence
  Synthetic oligonucleotide
aagcgcacgcugcggaggcugcugcag

SEQ ID NO: 2175 - RNA, 27 nt, Artificial Sequence
  Synthetic oligonucleotide
aacugaauucaaaaagaucaaagugcu

SEQ ID NO: 2176 - RNA, 27 nt, Artificial Sequence
  Synthetic oligonucleotide
caaagugcugggcuccggugcguucgg

SEQ ID NO: 2177 - RNA, 27 nt, Artificial Sequence
  Synthetic oligonucleotide
aagugcugggcuccggugcguucggca

SEQ ID NO: 2178 - RNA, 27 nt, Artificial Sequence
  Synthetic oligonucleotide
agugcugggcuccggugcguucggcac

SEQ ID NO: 2179 - RNA, 27 nt, Artificial Sequence
  Synthetic oligonucleotide
gugcugggcuccggugcguucggcacg

SEQ ID NO: 2180 - RNA, 27 nt, Artificial Sequence
  Synthetic oligonucleotide
ugcugggcuccggugcguucggcacgg

SEQ ID NO: 2181 - RNA, 27 nt, Artificial Sequence
  Synthetic oligonucleotide
cgugugccgccugcugggcaucugccu

SEQ ID NO: 2182 - RNA, 27 nt, Artificial Sequence
  Synthetic oligonucleotide
gugugccgccugcugggcaucugccuc

SEQ ID NO: 2183 - RNA, 27 nt, Artificial Sequence
  Synthetic oligonucleotide
gugccgccugcugggcaucugccucac

SEQ ID NO: 2184 - RNA, 27 nt, Artificial Sequence
  Synthetic oligonucleotide
caccgugcagcucaucacgcagcucau

SEQ ID NO: 2185 - RNA, 27 nt, Artificial Sequence
  Synthetic oligonucleotide
cgugcagcucaucacgcagcucaugcc

SEQ ID NO: 2186 - RNA, 27 nt, Artificial Sequence
  Synthetic oligonucleotide
cagcucaucacgcagcucaugcccuuc

SEQ ID NO: 2187 - RNA, 27 nt, Artificial Sequence
  Synthetic oligonucleotide
agcucaucacgcagcucaugcccuucg

SEQ ID NO: 2188 - RNA, 27 nt, Artificial Sequence
  Synthetic oligonucleotide
cagcucaugcccuucggcugccuccug

SEQ ID NO: 2189 - RNA, 27 nt, Artificial Sequence
  Synthetic oligonucleotide
agcucaugcccuucggcugccuccugg

SEQ ID NO: 2190 - RNA, 27 nt, Artificial Sequence
  Synthetic oligonucleotide
uuggaggaccgucgcuuggugcaccgc

SEQ ID NO: 2191 - RNA, 27 nt, Artificial Sequence
  Synthetic oligonucleotide
ggaggaccgucgcuuggugcaccgcga

SEQ ID NO: 2192 - RNA, 27 nt, Artificial Sequence
  Synthetic oligonucleotide
gaggaccgucgcuuggugcaccgcgac

SEQ ID NO: 2193 - RNA, 27 nt, Artificial Sequence
  Synthetic oligonucleotide
aggaccgucgcuuggugcaccgcgacc

SEQ ID NO: 2194 - RNA, 27 nt, Artificial Sequence
  Synthetic oligonucleotide
gaccgucgcuuggugcaccgcgaccug

SEQ ID NO: 2195 - RNA, 27 nt, Artificial Sequence
  Synthetic oligonucleotide
ccgucgcuuggugcaccgcgaccuggc

SEQ ID NO: 2196 - RNA, 27 nt, Artificial Sequence
  Synthetic oligonucleotide
gucgcuuggugcaccgcgaccuggcag

SEQ ID NO: 2197 - RNA, 27 nt, Artificial Sequence
  Synthetic oligonucleotide
ucgcuuggugcaccgcgaccuggcagc

SEQ ID NO: 2198 - RNA, 27 nt, Artificial Sequence
  Synthetic oligonucleotide
gcuuggugcaccgcgaccuggcagcca

SEQ ID NO: 2199 - RNA, 27 nt, Artificial Sequence
  Synthetic oligonucleotide
ggcauuggaaucaauuuuacacagaau

SEQ ID NO: 2200 - RNA, 27 nt, Artificial Sequence
  Synthetic oligonucleotide
ucaagugcuggaugauagacgcagaua

SEQ ID NO: 2201 - RNA, 27 nt, Artificial Sequence
  Synthetic oligonucleotide
aagugcuggaugauagacgcagauagu

SEQ ID NO: 2202 - RNA, 27 nt, Artificial Sequence
  Synthetic oligonucleotide
agugcuggaugauagacgcagauaguc

SEQ ID NO: 2203 - RNA, 27 nt, Artificial Sequence
  Synthetic oligonucleotide
ugcuggaugauagacgcagauagucgc

SEQ ID NO: 2204 - RNA, 27 nt, Artificial Sequence
  Synthetic oligonucleotide
cuccugagcucucugagugcaaccagc

SEQ ID NO: 2205 - RNA, 27 nt, Artificial Sequence
  Synthetic oligonucleotide
cugagcucucugagugcaaccagcaac

SEQ ID NO: 2206 - RNA, 27 nt, Artificial Sequence
  Synthetic oligonucleotide
aagcugucccaucaaggaagacagcuu

SEQ ID NO: 2207 - RNA, 27 nt, Artificial Sequence
  Synthetic oligonucleotide
agcugucccaucaaggaagacagcuuc

SEQ ID NO: 2208 - RNA, 27 nt, Artificial Sequence
  Synthetic oligonucleotide
aagacagcuucuugcagcgauacagcu

SEQ ID NO: 2209 - RNA, 27 nt, Artificial Sequence
  Synthetic oligonucleotide
agacagcuucuugcagcgauacagcuc

SEQ ID NO: 2210 - RNA, 27 nt, Artificial Sequence
  Synthetic oligonucleotide
gacagcuucuugcagcgauacagcuca

SEQ ID NO: 2211 - RNA, 27 nt, Artificial Sequence
  Synthetic oligonucleotide
acagcuucuugcagcgauacagcucag

SEQ ID NO: 2212 - RNA, 27 nt, Artificial Sequence
  Synthetic oligonucleotide
cagcuucuugcagcgauacagcucaga

SEQ ID NO: 2213 - RNA, 27 nt, Artificial Sequence
  Synthetic oligonucleotide
gcuucuugcagcgauacagcucagacc

SEQ ID NO: 2214 - RNA, 27 nt, Artificial Sequence
  Synthetic oligonucleotide
ccacaaagcagugaauuuauuggagca

SEQ ID NO: 2215 - RNA, 27 nt, Artificial Sequence
  Synthetic oligonucleotide
guauauuugaaaaaaaaaaaaaguaua

SEQ ID NO: 2216 - RNA, 27 nt, Artificial Sequence
  Synthetic oligonucleotide
ugugaggauuuuuauugauuggggauc

SEQ ID NO: 2217 - RNA, 27 nt, Artificial Sequence
  Synthetic oligonucleotide
cgcuauugauuuuuacuucaaugggcu

SEQ ID NO: 2218 - RNA, 27 nt, Artificial Sequence
  Synthetic oligonucleotide
aaggaagaagcuugcugguagcacuug

SEQ ID NO: 2219 - RNA, 27 nt, Artificial Sequence
  Synthetic oligonucleotide
aggaagaagcuugcugguagcacuugc

SEQ ID NO: 2220 - RNA, 27 nt, Artificial Sequence
  Synthetic oligonucleotide
ggaagaagcuugcugguagcacuugcu

SEQ ID NO: 2221 - RNA, 27 nt, Artificial Sequence
  Synthetic oligonucleotide
gaagaagcuugcugguagcacuugcua

SEQ ID NO: 2222 - RNA, 27 nt, Artificial Sequence
  Synthetic oligonucleotide
aagaagcuugcugguagcacuugcuac

SEQ ID NO: 2223 - RNA, 27 nt, Artificial Sequence
  Synthetic oligonucleotide
gaagcuugcugguagcacuugcuaccc

SEQ ID NO: 2224 - RNA, 27 nt, Artificial Sequence
  Synthetic oligonucleotide
aagcuugcugguagcacuugcuacccu

SEQ ID NO: 2225 - RNA, 27 nt, Artificial Sequence
  Synthetic oligonucleotide
agcuugcugguagcacuugcuacccug

SEQ ID NO: 2226 - RNA, 27 nt, Artificial Sequence
  Synthetic oligonucleotide
gcuugcugguagcacuugcuacccuga

SEQ ID NO: 2227 - RNA, 27 nt, Artificial Sequence
  Synthetic oligonucleotide
cuugcugguagcacuugcuacccugag

SEQ ID NO: 2228 - RNA, 27 nt, Artificial Sequence
  Synthetic oligonucleotide
uugcugguagcacuugcuacccugagu

SEQ ID NO: 2229 - RNA, 27 nt, Artificial Sequence
  Synthetic oligonucleotide
ggaugcuugauuccagugguucugcuu

SEQ ID NO: 2230 - RNA, 27 nt, Artificial Sequence
  Synthetic oligonucleotide
gaugcuugauuccagugguucugcuuc

SEQ ID NO: 2231 - RNA, 27 nt, Artificial Sequence
  Synthetic oligonucleotide
agcaggccggaucgguacuguaucaag

SEQ ID NO: 2232 - RNA, 27 nt, Artificial Sequence
  Synthetic oligonucleotide
gccggaucgguacuguaucaagucaug

SEQ ID NO: 2233 - RNA, 27 nt, Artificial Sequence
  Synthetic oligonucleotide
uccuuagacuuacuuuuguaaaaaugu

SEQ ID NO: 2234 - RNA, 27 nt, Artificial Sequence
  Synthetic oligonucleotide
cugucuugcugucaugaaaucagcaag

SEQ ID NO: 2235 - RNA, 27 nt, Artificial Sequence
  Synthetic oligonucleotide
ccuaaggauagcaccgcuuuuguucuc

SEQ ID NO: 2236 - RNA, 27 nt, Artificial Sequence
  Synthetic oligonucleotide
uaaggauagcaccgcuuuuguucucgc

SEQ ID NO: 2237 - RNA, 27 nt, Artificial Sequence
  Synthetic oligonucleotide
aaggauagcaccgcuuuuguucucgca

SEQ ID NO: 2238 - RNA, 27 nt, Artificial Sequence
  Synthetic oligonucleotide
aggauagcaccgcuuuuguucucgcaa

SEQ ID NO: 2239 - RNA, 27 nt, Artificial Sequence
  Synthetic oligonucleotide
ggauagcaccgcuuuuguucucgcaaa

SEQ ID NO: 2240 - RNA, 27 nt, Artificial Sequence
  Synthetic oligonucleotide
gauagcaccgcuuuuguucucgcaaaa

SEQ ID NO: 2241 - RNA, 27 nt, Artificial Sequence
  Synthetic oligonucleotide
auagcaccgcuuuuguucucgcaaaaa

SEQ ID NO: 2242 - RNA, 27 nt, Artificial Sequence
  Synthetic oligonucleotide
uagcaccgcuuuuguucucgcaaaaac

SEQ ID NO: 2243 - RNA, 27 nt, Artificial Sequence
  Synthetic oligonucleotide
agcaccgcuuuuguucucgcaaaaacg

SEQ ID NO: 2244 - RNA, 27 nt, Artificial Sequence
  Synthetic oligonucleotide
accgcuuuuguucucgcaaaaacguau

SEQ ID NO: 2245 - RNA, 27 nt, Artificial Sequence
  Synthetic oligonucleotide
ccgcuuuuguucucgcaaaaacguauc

SEQ ID NO: 2246 - RNA, 27 nt, Artificial Sequence
  Synthetic oligonucleotide
cgcuuuuguucucgcaaaaacguaucu

SEQ ID NO: 2247 - RNA, 27 nt, Artificial Sequence
  Synthetic oligonucleotide
gcuuuuguucucgcaaaaacguaucuc

SEQ ID NO: 2248 - RNA, 27 nt, Artificial Sequence
  Synthetic oligonucleotide
uguucucgcaaaaacguaucuccuaau

SEQ ID NO: 2249 - RNA, 27 nt, Artificial Sequence
  Synthetic oligonucleotide
caaaauuaguuuguguuacuuauggaa

SEQ ID NO: 2250 - RNA, 27 nt, Artificial Sequence
  Synthetic oligonucleotide
acuuauggaagauaguuuucuccuuuu

SEQ ID NO: 2251 - RNA, 27 nt, Artificial Sequence
  Synthetic oligonucleotide
cuucaaaagcuuuuuacucaaagagua

SEQ ID NO: 2252 - RNA, 27 nt, Artificial Sequence
  Synthetic oligonucleotide
aaacuaggguuugaaauugauaaugcu

SEQ ID NO: 2253 - RNA, 27 nt, Artificial Sequence
  Synthetic oligonucleotide
ccuaaaauaauuucucuacaauuggaa

SEQ ID NO: 2254 - RNA, 27 nt, Artificial Sequence
  Synthetic oligonucleotide
aacagcaguccuuuguaaacaguguuu

SEQ ID NO: 2255 - RNA, 27 nt, Artificial Sequence
  Synthetic oligonucleotide
uccaauuuaucaaggaagaaaugguuc

SEQ ID NO: 2256 - RNA, 27 nt, Artificial Sequence
  Synthetic oligonucleotide
cauacaaaauguuccuuuugcuuuuaa

SEQ ID NO: 2257 - RNA, 27 nt, Artificial Sequence
  Synthetic oligonucleotide
auguuccuuuugcuuuuaaaguaauuu

SEQ ID NO: 2258 - RNA, 27 nt, Artificial Sequence
  Synthetic oligonucleotide
uguuccuuuugcuuuuaaaguaauuuu

SEQ ID NO: 2259 - RNA, 27 nt, Artificial Sequence
  Synthetic oligonucleotide
uuuugcuuuuaaaguaauuuuugacuc

SEQ ID NO: 2260 - RNA, 27 nt, Artificial Sequence
  Synthetic oligonucleotide
uuguuaagaaaguauuugauuuuuguc

SEQ ID NO: 2261 - RNA, 27 nt, Artificial Sequence
  Synthetic oligonucleotide
auuuggaaauuaccuaugugcagagga

SEQ ID NO: 2262 - RNA, 27 nt, Artificial Sequence
  Synthetic oligonucleotide
uuuggaaauuaccuaugugcagaggaa

SEQ ID NO: 2263 - RNA, 27 nt, Artificial Sequence
  Synthetic oligonucleotide
aucuuuccuucuuaaagaccauccagg

SEQ ID NO: 2264 - RNA, 27 nt, Artificial Sequence
  Synthetic oligonucleotide
ucuuuccuucuuaaagaccauccagga

SEQ ID NO: 2265 - RNA, 27 nt, Artificial Sequence
  Synthetic oligonucleotide
cuuuccuucuuaaagaccauccaggag

SEQ ID NO: 2266 - RNA, 27 nt, Artificial Sequence
  Synthetic oligonucleotide
uuuccuucuuaaagaccauccaggagg

SEQ ID NO: 2267 - RNA, 27 nt, Artificial Sequence
  Synthetic oligonucleotide
uuccuucuuaaagaccauccaggaggu

SEQ ID NO: 2268 - RNA, 27 nt, Artificial Sequence
  Synthetic oligonucleotide
uccuucuuaaagaccauccaggaggug

SEQ ID NO: 2269 - RNA, 27 nt, Artificial Sequence
  Synthetic oligonucleotide
ccuucuuaaagaccauccaggaggugg

SEQ ID NO: 2270 - RNA, 27 nt, Artificial Sequence
  Synthetic oligonucleotide
cuucuuaaagaccauccaggagguggc

SEQ ID NO: 2271 - RNA, 27 nt, Artificial Sequence
  Synthetic oligonucleotide
uucuuaaagaccauccaggagguggcu

SEQ ID NO: 2272 - RNA, 27 nt, Artificial Sequence
  Synthetic oligonucleotide
ucuuaaagaccauccaggagguggcug

SEQ ID NO: 2273 - RNA, 27 nt, Artificial Sequence
  Synthetic oligonucleotide
cuuaaagaccauccaggagguggcugg

SEQ ID NO: 2274 - RNA, 27 nt, Artificial Sequence
  Synthetic oligonucleotide
uuaaagaccauccaggagguggcuggu

SEQ ID NO: 2275 - RNA, 27 nt, Artificial Sequence
  Synthetic oligonucleotide
uaaagaccauccaggagguggcugguu

SEQ ID NO: 2276 - RNA, 27 nt, Artificial Sequence
  Synthetic oligonucleotide
aaagaccauccaggagguggcugguua

SEQ ID NO: 2277 - RNA, 27 nt, Artificial Sequence
  Synthetic oligonucleotide
agugugauccaagcugucccaauggga

SEQ ID NO: 2278 - RNA, 27 nt, Artificial Sequence
  Synthetic oligonucleotide
gugugauccaagcugucccaaugggag

SEQ ID NO: 2279 - RNA, 27 nt, Artificial Sequence
  Synthetic oligonucleotide
ugugauccaagcugucccaaugggagc

SEQ ID NO: 2280 - RNA, 27 nt, Artificial Sequence
  Synthetic oligonucleotide
gugauccaagcugucccaaugggagcu

SEQ ID NO: 2281 - RNA, 27 nt, Artificial Sequence
  Synthetic oligonucleotide
ugauccaagcugucccaaugggagcug

SEQ ID NO: 2282 - RNA, 27 nt, Artificial Sequence
  Synthetic oligonucleotide
gcaggagaggagaacugccagaaacug

SEQ ID NO: 2283 - RNA, 27 nt, Artificial Sequence
  Synthetic oligonucleotide
caggagaggagaacugccagaaacuga

SEQ ID NO: 2284 - RNA, 27 nt, Artificial Sequence
  Synthetic oligonucleotide
aggagaggagaacugccagaaacugac

SEQ ID NO: 2285 - RNA, 27 nt, Artificial Sequence
  Synthetic oligonucleotide
ggagaggagaacugccagaaacugacc

SEQ ID NO: 2286 - RNA, 27 nt, Artificial Sequence
  Synthetic oligonucleotide
acugaccaaaaucaucugugcccagca

SEQ ID NO: 2287 - RNA, 27 nt, Artificial Sequence
  Synthetic oligonucleotide
cugaccaaaaucaucugugcccagcag

SEQ ID NO: 2288 - RNA, 27 nt, Artificial Sequence
  Synthetic oligonucleotide
ugaccaaaaucaucugugcccagcagu

SEQ ID NO: 2289 - RNA, 27 nt, Artificial Sequence
  Synthetic oligonucleotide
gaccaaaaucaucugugcccagcagug

SEQ ID NO: 2290 - RNA, 27 nt, Artificial Sequence
  Synthetic oligonucleotide
accaaaaucaucugugcccagcagugc

SEQ ID NO: 2291 - RNA, 27 nt, Artificial Sequence
  Synthetic oligonucleotide
ccaaaaucaucugugcccagcagugcu

SEQ ID NO: 2292 - RNA, 27 nt, Artificial Sequence
  Synthetic oligonucleotide
caaaaucaucugugcccagcagugcuc

SEQ ID NO: 2293 - RNA, 27 nt, Artificial Sequence
  Synthetic oligonucleotide
cccagugacugcugccacaaccagugu

SEQ ID NO: 2294 - RNA, 27 nt, Artificial Sequence
  Synthetic oligonucleotide
ccagugacugcugccacaaccagugug

SEQ ID NO: 2295 - RNA, 27 nt, Artificial Sequence
  Synthetic oligonucleotide
cagugacugcugccacaaccagugugc

SEQ ID NO: 2296 - RNA, 27 nt, Artificial Sequence
  Synthetic oligonucleotide
cucacucuccauaaaugcuacgaauau

SEQ ID NO: 2297 - RNA, 27 nt, Artificial Sequence
  Synthetic oligonucleotide
gguuuuugcugauucaggcuuggccug

SEQ ID NO: 2298 - RNA, 27 nt, Artificial Sequence
  Synthetic oligonucleotide
guuuuugcugauucaggcuuggccuga

SEQ ID NO: 2299 - RNA, 27 nt, Artificial Sequence
  Synthetic oligonucleotide
uuuuugcugauucaggcuuggccugaa

SEQ ID NO: 2300 - RNA, 27 nt, Artificial Sequence
  Synthetic oligonucleotide
uuuugcugauucaggcuuggccugaaa

SEQ ID NO: 2301 - RNA, 27 nt, Artificial Sequence
  Synthetic oligonucleotide
uuugcugauucaggcuuggccugaaaa

SEQ ID NO: 2302 - RNA, 27 nt, Artificial Sequence
  Synthetic oligonucleotide
uugcugauucaggcuuggccugaaaac

SEQ ID NO: 2303 - RNA, 27 nt, Artificial Sequence
  Synthetic oligonucleotide
ugcugauucaggcuuggccugaaaaca

SEQ ID NO: 2304 - RNA, 27 nt, Artificial Sequence
  Synthetic oligonucleotide
gcugauucaggcuuggccugaaaacag

SEQ ID NO: 2305 - RNA, 27 nt, Artificial Sequence
  Synthetic oligonucleotide
ccaagcaacauggucaguuuucucuug

SEQ ID NO: 2306 - RNA, 27 nt, Artificial Sequence
  Synthetic oligonucleotide
caagcaacauggucaguuuucucuugc

SEQ ID NO: 2307 - RNA, 27 nt, Artificial Sequence
  Synthetic oligonucleotide
aagcaacauggucaguuuucucuugca

SEQ ID NO: 2308 - RNA, 27 nt, Artificial Sequence
  Synthetic oligonucleotide
uacaauaaacuggaaaaaacuguuugg

SEQ ID NO: 2309 - RNA, 27 nt, Artificial Sequence
  Synthetic oligonucleotide
cucaggccaugaacaucaccugcacag

SEQ ID NO: 2310 - RNA, 27 nt, Artificial Sequence
  Synthetic oligonucleotide
ucaggccaugaacaucaccugcacagg

SEQ ID NO: 2311 - RNA, 27 nt, Artificial Sequence
  Synthetic oligonucleotide
guauccagugugcccacuacauugacg

SEQ ID NO: 2312 - RNA, 27 nt, Artificial Sequence
  Synthetic oligonucleotide
uauccagugugcccacuacauugacgg

SEQ ID NO: 2313 - RNA, 27 nt, Artificial Sequence
  Synthetic oligonucleotide
auccagugugcccacuacauugacggc

SEQ ID NO: 2314 - RNA, 27 nt, Artificial Sequence
  Synthetic oligonucleotide
uccagugugcccacuacauugacggcc

SEQ ID NO: 2315 - RNA, 27 nt, Artificial Sequence
  Synthetic oligonucleotide
ccagugugcccacuacauugacggccc

SEQ ID NO: 2316 - RNA, 27 nt, Artificial Sequence
  Synthetic oligonucleotide
cugaauucaaaaagaucaaagugcugg

SEQ ID NO: 2317 - RNA, 27 nt, Artificial Sequence
  Synthetic oligonucleotide
ugaauucaaaaagaucaaagugcuggg

SEQ ID NO: 2318 - RNA, 27 nt, Artificial Sequence
  Synthetic oligonucleotide
gacucuggaucccagaaggugagaaag

SEQ ID NO: 2319 - RNA, 27 nt, Artificial Sequence
  Synthetic oligonucleotide
acucuggaucccagaaggugagaaagu

SEQ ID NO: 2320 - RNA, 27 nt, Artificial Sequence
  Synthetic oligonucleotide
cucuggaucccagaaggugagaaaguu

SEQ ID NO: 2321 - RNA, 27 nt, Artificial Sequence
  Synthetic oligonucleotide
ucuggaucccagaaggugagaaaguua

SEQ ID NO: 2322 - RNA, 27 nt, Artificial Sequence
  Synthetic oligonucleotide
cuggaucccagaaggugagaaaguuaa

SEQ ID NO: 2323 - RNA, 27 nt, Artificial Sequence
  Synthetic oligonucleotide
uggaucccagaaggugagaaaguuaaa

SEQ ID NO: 2324 - RNA, 27 nt, Artificial Sequence
  Synthetic oligonucleotide
ggaucccagaaggugagaaaguuaaaa

SEQ ID NO: 2325 - RNA, 27 nt, Artificial Sequence
  Synthetic oligonucleotide
gaucccagaaggugagaaaguuaaaau

SEQ ID NO: 2326 - RNA, 27 nt, Artificial Sequence
  Synthetic oligonucleotide
cgcagcaugucaagaucacagauuuug

SEQ ID NO: 2327 - RNA, 27 nt, Artificial Sequence
  Synthetic oligonucleotide
gcagcaugucaagaucacagauuuugg

SEQ ID NO: 2328 - RNA, 27 nt, Artificial Sequence
  Synthetic oligonucleotide
cagcaugucaagaucacagauuuuggg

SEQ ID NO: 2329 - RNA, 27 nt, Artificial Sequence
  Synthetic oligonucleotide
agcaugucaagaucacagauuuugggc

SEQ ID NO: 2330 - RNA, 27 nt, Artificial Sequence
  Synthetic oligonucleotide
gcaugucaagaucacagauuuugggcu

SEQ ID NO: 2331 - RNA, 27 nt, Artificial Sequence
  Synthetic oligonucleotide
caugucaagaucacagauuuugggcug

SEQ ID NO: 2332 - RNA, 27 nt, Artificial Sequence
  Synthetic oligonucleotide
augucaagaucacagauuuugggcugg

SEQ ID NO: 2333 - RNA, 27 nt, Artificial Sequence
  Synthetic oligonucleotide
ugucaagaucacagauuuugggcuggc

SEQ ID NO: 2334 - RNA, 27 nt, Artificial Sequence
  Synthetic oligonucleotide
gucaagaucacagauuuugggcuggcc

SEQ ID NO: 2335 - RNA, 27 nt, Artificial Sequence
  Synthetic oligonucleotide
ucaagaucacagauuuugggcuggcca

SEQ ID NO: 2336 - RNA, 27 nt, Artificial Sequence
  Synthetic oligonucleotide
caagaucacagauuuugggcuggccaa

SEQ ID NO: 2337 - RNA, 27 nt, Artificial Sequence
  Synthetic oligonucleotide
aagaucacagauuuugggcuggccaaa

SEQ ID NO: 2338 - RNA, 27 nt, Artificial Sequence
  Synthetic oligonucleotide
agaucacagauuuugggcuggccaaac

SEQ ID NO: 2339 - RNA, 27 nt, Artificial Sequence
  Synthetic oligonucleotide
gaucacagauuuugggcuggccaaacu

SEQ ID NO: 2340 - RNA, 27 nt, Artificial Sequence
  Synthetic oligonucleotide
aucacagauuuugggcuggccaaacug

SEQ ID NO: 2341 - RNA, 27 nt, Artificial Sequence
  Synthetic oligonucleotide
ucacagauuuugggcuggccaaacugc

SEQ ID NO: 2342 - RNA, 27 nt, Artificial Sequence
  Synthetic oligonucleotide
cacagauuuugggcuggccaaacugcu

SEQ ID NO: 2343 - RNA, 27 nt, Artificial Sequence
  Synthetic oligonucleotide
acagauuuugggcuggccaaacugcug

SEQ ID NO: 2344 - RNA, 27 nt, Artificial Sequence
  Synthetic oligonucleotide
cagauuuugggcuggccaaacugcugg

SEQ ID NO: 2345 - RNA, 27 nt, Artificial Sequence
  Synthetic oligonucleotide
agauuuugggcuggccaaacugcuggg

SEQ ID NO: 2346 - RNA, 27 nt, Artificial Sequence
  Synthetic oligonucleotide
gauuuugggcuggccaaacugcugggu

SEQ ID NO: 2347 - RNA, 27 nt, Artificial Sequence
  Synthetic oligonucleotide
auuuugggcuggccaaacugcugggug

SEQ ID NO: 2348 - RNA, 27 nt, Artificial Sequence
  Synthetic oligonucleotide
uuuugggcuggccaaacugcugggugc

SEQ ID NO: 2349 - RNA, 27 nt, Artificial Sequence
  Synthetic oligonucleotide
aggcaaagugccuaucaaguggauggc

SEQ ID NO: 2350 - RNA, 27 nt, Artificial Sequence
  Synthetic oligonucleotide
ggcaaagugccuaucaaguggauggca

SEQ ID NO: 2351 - RNA, 27 nt, Artificial Sequence
  Synthetic oligonucleotide
gcaaagugccuaucaaguggauggcau

SEQ ID NO: 2352 - RNA, 27 nt, Artificial Sequence
  Synthetic oligonucleotide
caaagugccuaucaaguggauggcauu

SEQ ID NO: 2353 - RNA, 27 nt, Artificial Sequence
  Synthetic oligonucleotide
aaagugccuaucaaguggauggcauug

SEQ ID NO: 2354 - RNA, 27 nt, Artificial Sequence
  Synthetic oligonucleotide
aagugccuaucaaguggauggcauugg

SEQ ID NO: 2355 - RNA, 27 nt, Artificial Sequence
  Synthetic oligonucleotide
agugccuaucaaguggauggcauugga

SEQ ID NO: 2356 - RNA, 27 nt, Artificial Sequence
  Synthetic oligonucleotide
guaccaucgaugucuacaugaucaugg

SEQ ID NO: 2357 - RNA, 27 nt, Artificial Sequence
  Synthetic oligonucleotide
uaccaucgaugucuacaugaucauggu

SEQ ID NO: 2358 - RNA, 27 nt, Artificial Sequence
  Synthetic oligonucleotide
accaucgaugucuacaugaucaugguc

SEQ ID NO: 2359 - RNA, 27 nt, Artificial Sequence
  Synthetic oligonucleotide
ccaucgaugucuacaugaucaugguca

SEQ ID NO: 2360 - RNA, 27 nt, Artificial Sequence
  Synthetic oligonucleotide
caucgaugucuacaugaucauggucaa

SEQ ID NO: 2361 - RNA, 27 nt, Artificial Sequence
  Synthetic oligonucleotide
aucgaugucuacaugaucauggucaag

SEQ ID NO: 2362 - RNA, 27 nt, Artificial Sequence
  Synthetic oligonucleotide
ucgaugucuacaugaucauggucaagu

SEQ ID NO: 2363 - RNA, 27 nt, Artificial Sequence
  Synthetic oligonucleotide
cgaugucuacaugaucauggucaagug

SEQ ID NO: 2364 - RNA, 27 nt, Artificial Sequence
  Synthetic oligonucleotide
gaugucuacaugaucauggucaagugc

SEQ ID NO: 2365 - RNA, 27 nt, Artificial Sequence
  Synthetic oligonucleotide
augucuacaugaucauggucaagugcu

SEQ ID NO: 2366 - RNA, 27 nt, Artificial Sequence
  Synthetic oligonucleotide
ugucuacaugaucauggucaagugcug

SEQ ID NO: 2367 - RNA, 27 nt, Artificial Sequence
  Synthetic oligonucleotide
gucuacaugaucauggucaagugcugg

SEQ ID NO: 2368 - RNA, 27 nt, Artificial Sequence
  Synthetic oligonucleotide
ucuacaugaucauggucaagugcugga

SEQ ID NO: 2369 - RNA, 27 nt, Artificial Sequence
  Synthetic oligonucleotide
cuacaugaucauggucaagugcuggau

SEQ ID NO: 2370 - RNA, 27 nt, Artificial Sequence
  Synthetic oligonucleotide
uacaugaucauggucaagugcuggaug

SEQ ID NO: 2371 - RNA, 27 nt, Artificial Sequence
  Synthetic oligonucleotide
acaugaucauggucaagugcuggauga

SEQ ID NO: 2372 - RNA, 27 nt, Artificial Sequence
  Synthetic oligonucleotide
caugaucauggucaagugcuggaugau

SEQ ID NO: 2373 - RNA, 27 nt, Artificial Sequence
  Synthetic oligonucleotide
augaucauggucaagugcuggaugaua

SEQ ID NO: 2374 - RNA, 27 nt, Artificial Sequence
  Synthetic oligonucleotide
ugaucauggucaagugcuggaugauag

SEQ ID NO: 2375 - RNA, 27 nt, Artificial Sequence
  Synthetic oligonucleotide
gaucauggucaagugcuggaugauaga

SEQ ID NO: 2376 - RNA, 27 nt, Artificial Sequence
  Synthetic oligonucleotide
aucauggucaagugcuggaugauagac

SEQ ID NO: 2377 - RNA, 27 nt, Artificial Sequence
  Synthetic oligonucleotide
ucauggucaagugcuggaugauagacg

SEQ ID NO: 2378 - RNA, 27 nt, Artificial Sequence
  Synthetic oligonucleotide
cauggucaagugcuggaugauagacgc

SEQ ID NO: 2379 - RNA, 27 nt, Artificial Sequence
  Synthetic oligonucleotide
auggucaagugcuggaugauagacgca

SEQ ID NO: 2380 - RNA, 27 nt, Artificial Sequence
  Synthetic oligonucleotide
uggucaagugcuggaugauagacgcag

SEQ ID NO: 2381 - RNA, 27 nt, Artificial Sequence
  Synthetic oligonucleotide
ggucaagugcuggaugauagacgcaga

SEQ ID NO: 2382 - RNA, 27 nt, Artificial Sequence
  Synthetic oligonucleotide
ucgaauucuccaaaauggcccgagacc

SEQ ID NO: 2383 - RNA, 27 nt, Artificial Sequence
  Synthetic oligonucleotide
cgaauucuccaaaauggcccgagaccc

SEQ ID NO: 2384 - RNA, 27 nt, Artificial Sequence
  Synthetic oligonucleotide
gggaugaaagaaugcauuugccaaguc

SEQ ID NO: 2385 - RNA, 27 nt, Artificial Sequence
  Synthetic oligonucleotide
ggaugaaagaaugcauuugccaagucc

SEQ ID NO: 2386 - RNA, 27 nt, Artificial Sequence
  Synthetic oligonucleotide
gaugaaagaaugcauuugccaaguccu

SEQ ID NO: 2387 - RNA, 27 nt, Artificial Sequence
  Synthetic oligonucleotide
augaaagaaugcauuugccaaguccua

SEQ ID NO: 2388 - RNA, 27 nt, Artificial Sequence
  Synthetic oligonucleotide
ugaaagaaugcauuugccaaguccuac

SEQ ID NO: 2389 - RNA, 27 nt, Artificial Sequence
  Synthetic oligonucleotide
uggacaacccugacuaccagcaggacu

SEQ ID NO: 2390 - RNA, 27 nt, Artificial Sequence
  Synthetic oligonucleotide
ggacaacccugacuaccagcaggacuu

SEQ ID NO: 2391 - RNA, 27 nt, Artificial Sequence
  Synthetic oligonucleotide
gacaacccugacuaccagcaggacuuc

SEQ ID NO: 2392 - RNA, 27 nt, Artificial Sequence
  Synthetic oligonucleotide
acaacccugacuaccagcaggacuucu

SEQ ID NO: 2393 - RNA, 27 nt, Artificial Sequence
  Synthetic oligonucleotide
caacccugacuaccagcaggacuucuu

SEQ ID NO: 2394 - RNA, 27 nt, Artificial Sequence
  Synthetic oligonucleotide
aacccugacuaccagcaggacuucuuu

SEQ ID NO: 2395 - RNA, 27 nt, Artificial Sequence
  Synthetic oligonucleotide
acccugacuaccagcaggacuucuuuc

SEQ ID NO: 2396 - RNA, 27 nt, Artificial Sequence
  Synthetic oligonucleotide
cccugacuaccagcaggacuucuuucc

SEQ ID NO: 2397 - RNA, 27 nt, Artificial Sequence
  Synthetic oligonucleotide
cagcgcaacgcgcagcagccucccucc

SEQ ID NO: 2398 - RNA, 27 nt, Artificial Sequence
  Synthetic oligonucleotide
acgcgcagcagccucccuccucuucuu

SEQ ID NO: 2399 - RNA, 27 nt, Artificial Sequence
  Synthetic oligonucleotide
agccucccuccucuucuucccgcacug

SEQ ID NO: 2400 - RNA, 27 nt, Artificial Sequence
  Synthetic oligonucleotide
cucccuccucuucuucccgcacugugc

SEQ ID NO: 2401 - RNA, 27 nt, Artificial Sequence
  Synthetic oligonucleotide
cccuccucuucuucccgcacugugcgc

SEQ ID NO: 2402 - RNA, 27 nt, Artificial Sequence
  Synthetic oligonucleotide
cuccucuucuucccgcacugugcgcuc

SEQ ID NO: 2403 - RNA, 27 nt, Artificial Sequence
  Synthetic oligonucleotide
cucuucuucccgcacugugcgcuccuc

SEQ ID NO: 2404 - RNA, 27 nt, Artificial Sequence
  Synthetic oligonucleotide
cuucuucccgcacugugcgcuccuccu

SEQ ID NO: 2405 - RNA, 27 nt, Artificial Sequence
  Synthetic oligonucleotide
uucuucccgcacugugcgcuccuccug

SEQ ID NO: 2406 - RNA, 27 nt, Artificial Sequence
  Synthetic oligonucleotide
ucuucccgcacugugcgcuccuccugg

SEQ ID NO: 2407 - RNA, 27 nt, Artificial Sequence
  Synthetic oligonucleotide
cugugcgcuccuccugggcuagggcgu

SEQ ID NO: 2408 - RNA, 27 nt, Artificial Sequence
  Synthetic oligonucleotide
ugcgcuccuccugggcuagggcgucug

SEQ ID NO: 2409 - RNA, 27 nt, Artificial Sequence
  Synthetic oligonucleotide
cacacugcugguguugcugaccgcgcu

SEQ ID NO: 2410 - RNA, 27 nt, Artificial Sequence
  Synthetic oligonucleotide
acacugcugguguugcugaccgcgcuc

SEQ ID NO: 2411 - RNA, 27 nt, Artificial Sequence
  Synthetic oligonucleotide
cacugcugguguugcugaccgcgcucu

SEQ ID NO: 2412 - RNA, 27 nt, Artificial Sequence
  Synthetic oligonucleotide
acugcugguguugcugaccgcgcucug

SEQ ID NO: 2413 - RNA, 27 nt, Artificial Sequence
  Synthetic oligonucleotide
cugcugguguugcugaccgcgcucugc

SEQ ID NO: 2414 - RNA, 27 nt, Artificial Sequence
  Synthetic oligonucleotide
ugcugguguugcugaccgcgcucugcg

SEQ ID NO: 2415 - RNA, 27 nt, Artificial Sequence
  Synthetic oligonucleotide
gcugguguugcugaccgcgcucugcgc

SEQ ID NO: 2416 - RNA, 27 nt, Artificial Sequence
  Synthetic oligonucleotide
ugguguugcugaccgcgcucugcgccg

SEQ ID NO: 2417 - RNA, 27 nt, Artificial Sequence
  Synthetic oligonucleotide
gguguugcugaccgcgcucugcgccgc

SEQ ID NO: 2418 - RNA, 27 nt, Artificial Sequence
  Synthetic oligonucleotide
guguugcugaccgcgcucugcgccgca

SEQ ID NO: 2419 - RNA, 27 nt, Artificial Sequence
  Synthetic oligonucleotide
uguugcugaccgcgcucugcgccgcag

SEQ ID NO: 2420 - RNA, 27 nt, Artificial Sequence
  Synthetic oligonucleotide
ugcugaccgcgcucugcgccgcaggug

SEQ ID NO: 2421 - RNA, 27 nt, Artificial Sequence
  Synthetic oligonucleotide
gcugaccgcgcucugcgccgcaggugg

SEQ ID NO: 2422 - RNA, 27 nt, Artificial Sequence
  Synthetic oligonucleotide
uccugauuggugcugugcgauucagca

SEQ ID NO: 2423 - RNA, 27 nt, Artificial Sequence
  Synthetic oligonucleotide
ccugauuggugcugugcgauucagcaa

SEQ ID NO: 2424 - RNA, 27 nt, Artificial Sequence
  Synthetic oligonucleotide
cugauuggugcugugcgauucagcaac

SEQ ID NO: 2425 - RNA, 27 nt, Artificial Sequence
  Synthetic oligonucleotide
gauuggugcugugcgauucagcaacaa

SEQ ID NO: 2426 - RNA, 27 nt, Artificial Sequence
  Synthetic oligonucleotide
uuggugcugugcgauucagcaacaacc

SEQ ID NO: 2427 - RNA, 27 nt, Artificial Sequence
  Synthetic oligonucleotide
uggugcugugcgauucagcaacaaccc

SEQ ID NO: 2428 - RNA, 27 nt, Artificial Sequence
  Synthetic oligonucleotide
uccaagcugucccaauggaagcugcug

SEQ ID NO: 2429 - RNA, 27 nt, Artificial Sequence
  Synthetic oligonucleotide
cugugcccagcaauguucccaucgcug

SEQ ID NO: 2430 - RNA, 27 nt, Artificial Sequence
  Synthetic oligonucleotide
ggaaguacagcuuuggugccaccugug

SEQ ID NO: 2431 - RNA, 27 nt, Artificial Sequence
  Synthetic oligonucleotide
cugucgcaaaguuuguaauggcauagg

SEQ ID NO: 2432 - RNA, 27 nt, Artificial Sequence
  Synthetic oligonucleotide
gggauucuuucacgcgcacuccuccuc

SEQ ID NO: 2433 - RNA, 27 nt, Artificial Sequence
  Synthetic oligonucleotide
aacaggcuuuuugcugauucaggcuug

SEQ ID NO: 2434 - RNA, 27 nt, Artificial Sequence
  Synthetic oligonucleotide
uucaggcuuggccugauaacuggacug

SEQ ID NO: 2435 - RNA, 27 nt, Artificial Sequence
  Synthetic oligonucleotide
caggcuuggccugauaacuggacugac

SEQ ID NO: 2436 - RNA, 27 nt, Artificial Sequence
  Synthetic oligonucleotide
gcuuggccugauaacuggacugaccuc

SEQ ID NO: 2437 - RNA, 27 nt, Artificial Sequence
  Synthetic oligonucleotide
acgccaacuguaccuauggaugugcug

SEQ ID NO: 2438 - RNA, 27 nt, Artificial Sequence
  Synthetic oligonucleotide
cacugggauuguggguggccuccucuu

SEQ ID NO: 2439 - RNA, 27 nt, Artificial Sequence
  Synthetic oligonucleotide
ggugguggcccuugggauuggccuauu

SEQ ID NO: 2440 - RNA, 27 nt, Artificial Sequence
  Synthetic oligonucleotide
gauuggccuauucaugcgaagacguca

SEQ ID NO: 2441 - RNA, 27 nt, Artificial Sequence
  Synthetic oligonucleotide
cgccgccugcuucaagagagagagcuc

SEQ ID NO: 2442 - RNA, 27 nt, Artificial Sequence
  Synthetic oligonucleotide
gccgccugcuucaagagagagagcucg

SEQ ID NO: 2443 - RNA, 27 nt, Artificial Sequence
  Synthetic oligonucleotide
ccgccugcuucaagagagagagcucgu

SEQ ID NO: 2444 - RNA, 27 nt, Artificial Sequence
  Synthetic oligonucleotide
guggacaacccucauguaugccgccuc

SEQ ID NO: 2445 - RNA, 27 nt, Artificial Sequence
  Synthetic oligonucleotide
uguaugccgccuccugggcaucugucu

SEQ ID NO: 2446 - RNA, 27 nt, Artificial Sequence
  Synthetic oligonucleotide
cagcucaugcccuacgguugccuccug

SEQ ID NO: 2447 - RNA, 27 nt, Artificial Sequence
  Synthetic oligonucleotide
agcucaugcccuacgguugccuccugg

SEQ ID NO: 2448 - RNA, 27 nt, Artificial Sequence
  Synthetic oligonucleotide
gaucggcguuuggugcaccgugacuug

SEQ ID NO: 2449 - RNA, 27 nt, Artificial Sequence
  Synthetic oligonucleotide
gcguuuggugcaccgugacuuggcagc

SEQ ID NO: 2450 - RNA, 27 nt, Artificial Sequence
  Synthetic oligonucleotide
uugggcuggccaaacugcuuggugcug

SEQ ID NO: 2451 - RNA, 27 nt, Artificial Sequence
  Synthetic oligonucleotide
ugggcuggccaaacugcuuggugcuga

SEQ ID NO: 2452 - RNA, 27 nt, Artificial Sequence
  Synthetic oligonucleotide
ggcuggccaaacugcuuggugcugaag

SEQ ID NO: 2453 - RNA, 27 nt, Artificial Sequence
  Synthetic oligonucleotide
gcuggccaaacugcuuggugcugaaga

SEQ ID NO: 2454 - RNA, 27 nt, Artificial Sequence
  Synthetic oligonucleotide
gucaagugcuggaugauagaugcugau

SEQ ID NO: 2455 - RNA, 27 nt, Artificial Sequence
  Synthetic oligonucleotide
ucaagugcuggaugauagaugcugaua

SEQ ID NO: 2456 - RNA, 27 nt, Artificial Sequence
  Synthetic oligonucleotide
caagugcuggaugauagaugcugauag

SEQ ID NO: 2457 - RNA, 27 nt, Artificial Sequence
  Synthetic oligonucleotide
aagugcuggaugauagaugcugauagc

SEQ ID NO: 2458 - RNA, 27 nt, Artificial Sequence
  Synthetic oligonucleotide
agugcuggaugauagaugcugauagcc

SEQ ID NO: 2459 - RNA, 27 nt, Artificial Sequence
  Synthetic oligonucleotide
gugcuggaugauagaugcugauagccg

SEQ ID NO: 2460 - RNA, 27 nt, Artificial Sequence
  Synthetic oligonucleotide
ugcuggaugauagaugcugauagccgc

SEQ ID NO: 2461 - RNA, 27 nt, Artificial Sequence
  Synthetic oligonucleotide
gcuggaugauagaugcugauagccgcc

SEQ ID NO: 2462 - RNA, 27 nt, Artificial Sequence
  Synthetic oligonucleotide
cuggaugauagaugcugauagccgccc

SEQ ID NO: 2463 - RNA, 27 nt, Artificial Sequence
  Synthetic oligonucleotide
uggaugauagaugcugauagccgccca

SEQ ID NO: 2464 - RNA, 27 nt, Artificial Sequence
  Synthetic oligonucleotide
augauagaugcugauagccgcccaaag

SEQ ID NO: 2465 - RNA, 27 nt, Artificial Sequence
  Synthetic oligonucleotide
gauagaugcugauagccgcccaaaguu

SEQ ID NO: 2466 - RNA, 27 nt, Artificial Sequence
  Synthetic oligonucleotide
gagcugccgugucaaagaagacgccuu

SEQ ID NO: 2467 - RNA, 27 nt, Artificial Sequence
  Synthetic oligonucleotide
agcugccgugucaaagaagacgccuuc

SEQ ID NO: 2468 - RNA, 27 nt, Artificial Sequence
  Synthetic oligonucleotide
aagacgccuucuugcagcgguacagcu

SEQ ID NO: 2469 - RNA, 27 nt, Artificial Sequence
  Synthetic oligonucleotide
agacgccuucuugcagcgguacagcuc

SEQ ID NO: 2470 - RNA, 27 nt, Artificial Sequence
  Synthetic oligonucleotide
gacgccuucuugcagcgguacagcucc

SEQ ID NO: 2471 - RNA, 27 nt, Artificial Sequence
  Synthetic oligonucleotide
acgccuucuugcagcgguacagcuccg

SEQ ID NO: 2472 - RNA, 27 nt, Artificial Sequence
  Synthetic oligonucleotide
cgccuucuugcagcgguacagcuccga

SEQ ID NO: 2473 - RNA, 27 nt, Artificial Sequence
  Synthetic oligonucleotide
gccuucuugcagcgguacagcuccgac

SEQ ID NO: 2474 - RNA, 27 nt, Artificial Sequence
  Synthetic oligonucleotide
ccuucuugcagcgguacagcuccgacc

SEQ ID NO: 2475 - RNA, 27 nt, Artificial Sequence
  Synthetic oligonucleotide
gacuggcuuuaaagcauaacucugaug

SEQ ID NO: 2476 - RNA, 27 nt, Artificial Sequence
  Synthetic oligonucleotide
aagugggccucucuccugaugcacuuu

SEQ ID NO: 2477 - RNA, 27 nt, Artificial Sequence
  Synthetic oligonucleotide
agugggccucucuccugaugcacuuug

SEQ ID NO: 2478 - RNA, 27 nt, Artificial Sequence
  Synthetic oligonucleotide
gugggccucucuccugaugcacuuugg

SEQ ID NO: 2479 - RNA, 27 nt, Artificial Sequence
  Synthetic oligonucleotide
ugggccucucuccugaugcacuuuggg

SEQ ID NO: 2480 - RNA, 27 nt, Artificial Sequence
  Synthetic oligonucleotide
gccucucuccugaugcacuuugggaag

SEQ ID NO: 2481 - RNA, 27 nt, Artificial Sequence
  Synthetic oligonucleotide
gauugaugcacucuuguagucugguac

SEQ ID NO: 2482 - RNA, 27 nt, Artificial Sequence
  Synthetic oligonucleotide
uagacuuccuucuauguuuucuguuuc

SEQ ID NO: 2483 - RNA, 27 nt, Artificial Sequence
  Synthetic oligonucleotide
cuucuauguuuucuguuucauuguuuu

SEQ ID NO: 2484 - RNA, 27 nt, Artificial Sequence
  Synthetic oligonucleotide
uauguuuuucuuccugguaaacugcag

SEQ ID NO: 2485 - RNA, 27 nt, Artificial Sequence
  Synthetic oligonucleotide
auguuuuucuuccugguaaacugcagc

SEQ ID NO: 2486 - RNA, 27 nt, Artificial Sequence
  Synthetic oligonucleotide
uguuuuucuuccugguaaacugcagcc

SEQ ID NO: 2487 - RNA, 27 nt, Artificial Sequence
  Synthetic oligonucleotide
uuucuuccugguaaacugcagccaaac

SEQ ID NO: 2488 - RNA, 27 nt, Artificial Sequence
  Synthetic oligonucleotide
uucgaucuuccuaaugcugugacccuu

SEQ ID NO: 2489 - RNA, 27 nt, Artificial Sequence
  Synthetic oligonucleotide
ucgaucuuccuaaugcugugacccuuu

SEQ ID NO: 2490 - RNA, 27 nt, Artificial Sequence
  Synthetic oligonucleotide
uuguugcuacuucauaacuguaaauuu

SEQ ID NO: 2491 - RNA, 27 nt, Artificial Sequence
  Synthetic oligonucleotide
gcuugcagcauccucugguuuccuaac

SEQ ID NO: 2492 - RNA, 27 nt, Artificial Sequence
  Synthetic oligonucleotide
cguugcaagccacucuaacuguagcaa

SEQ ID NO: 2493 - RNA, 21 nt, Artificial Sequence
  Synthetic oligonucleotide
uugaaguaaaaaucaauagcg

SEQ ID NO: 2494 - RNA, 21 nt, Artificial Sequence
  Synthetic oligonucleotide
cuauugauuuuuacuucaaug

SEQ ID NO: 2495 - RNA, 21 nt, Artificial Sequence
  Synthetic oligonucleotide
cgcuauugauuuuuacuucaa

SEQ ID NO: 2496 - RNA, 21 nt, Artificial Sequence
  Synthetic oligonucleotide
cgcuauugauuuuuacuuccc

SEQ ID NO: 2497 - DNA, 25 bp, Artificial Sequence
  Synthetic oligonucleotide
cuauugauuuuuacuucaaugagct

SEQ ID NO: 2498 - DNA, 25 bp, Artificial Sequence
  Synthetic oligonucleotide
cuauugauuuuuacuucaauggact

SEQ ID NO: 2499 - DNA, 25 bp, Artificial Sequence
  Synthetic oligonucleotide
cuauugauuuuuacuucaaugggat

SEQ ID NO: 2500 - DNA, 25 bp, Artificial Sequence
  Synthetic oligonucleotide
cuauugauuuuuacuucaaugggac

SEQ ID NO: 2501 - RNA, 27 nt, Artificial Sequence
  Synthetic oligonucleotide
cgcccauugaaguaaaaaucaauagcg

SEQ ID NO: 2502 - RNA, 27 nt, Artificial Sequence
  Synthetic oligonucleotide
accccauugaaguaaaaaucaauagcg

SEQ ID NO: 2503 - RNA, 27 nt, Artificial Sequence
  Synthetic oligonucleotide
agaccauugaaguaaaaaucaauagcg

SEQ ID NO: 2504 - RNA, 27 nt, Artificial Sequence
  Synthetic oligonucleotide
agcacauugaaguaaaaaucaauagcg

SEQ ID NO: 2505 - RNA, 25 nt, Artificial Sequence
  Synthetic oligonucleotide
  misc_feature: n=any ribonucleotide
  misc_feature (22)..(25): n is a, c, g, or u
cuauugauuuuuacuucaaugnnnn

SEQ ID NO: 2506 - RNA, 27 nt, Artificial Sequence
  Synthetic oligonucleotide
  misc_feature: n=any ribonucleotide
  misc_feature (1)..(6): n is a, c, g, or u
nnnnnnuugaaguaaaaaucaauagcg

SEQ ID NO: 2507 - DNA, 27 bp, Artificial Sequence
  Synthetic oligonucleotide
  misc_feature: n=any ribonucleotide
  misc_feature (22)..(27): n is a, c, g, or t
cgctattgatttttacttcaannnnnn

SEQ ID NO: 2508 - DNA, 32 bp, Artificial Sequence
  Synthetic oligonucleotide
ctctggatcccagaaggtgagaaagttaaaat

SEQ ID NO: 2509 - RNA, 21 nt, Artificial Sequence
  Synthetic oligonucleotide
ggcgcagcgcggccgcagcag

SEQ ID NO: 2510 - RNA, 21 nt, Artificial Sequence
  Synthetic oligonucleotide
gcgcagcgcggccgcagcagc

SEQ ID NO: 2511 - RNA, 21 nt, Artificial Sequence
  Synthetic oligonucleotide
gcagcgcggccgcagcagccu

SEQ ID NO: 2512 - RNA, 21 nt, Artificial Sequence
  Synthetic oligonucleotide
cagcgcuccuggcgcugcugg

SEQ ID NO: 2513 - RNA, 21 nt, Artificial Sequence
  Synthetic oligonucleotide
gcgcuccuggcgcugcuggcu

SEQ ID NO: 2514 - RNA, 21 nt, Artificial Sequence
  Synthetic oligonucleotide
gcuccuggcgcugcuggcugc

SEQ ID NO: 2515 - RNA, 21 nt, Artificial Sequence
  Synthetic oligonucleotide
caguugggcacuuuugaagau

SEQ ID NO: 2516 - RNA, 21 nt, Artificial Sequence
  Synthetic oligonucleotide
ugggaauuuggaaauuaccua

SEQ ID NO: 2517 - RNA, 21 nt, Artificial Sequence
  Synthetic oligonucleotide
aauuaugaucuuuccuucuua

SEQ ID NO: 2518 - RNA, 21 nt, Artificial Sequence
  Synthetic oligonucleotide
guggcugguuauguccucauu

SEQ ID NO: 2519 - RNA, 21 nt, Artificial Sequence
  Synthetic oligonucleotide
ugcccaugagaaauuuacagg

SEQ ID NO: 2520 - RNA, 21 nt, Artificial Sequence
  Synthetic oligonucleotide
ccugcauggcgccgugcgguu

SEQ ID NO: 2521 - RNA, 21 nt, Artificial Sequence
  Synthetic oligonucleotide
uggcgccgugcgguucagcaa

SEQ ID NO: 2522 - RNA, 21 nt, Artificial Sequence
  Synthetic oligonucleotide
uggcgccgugcgguucagcaa

SEQ ID NO: 2523 - RNA, 21 nt, Artificial Sequence
  Synthetic oligonucleotide
gcgccgugcgguucagcaaca

SEQ ID NO: 2524 - RNA, 21 nt, Artificial Sequence
  Synthetic oligonucleotide
cgccgugcgguucagcaacaa

SEQ ID NO: 2525 - RNA, 21 nt, Artificial Sequence
  Synthetic oligonucleotide
cagcugccaaaagugugaucc

SEQ ID NO: 2526 - RNA, 21 nt, Artificial Sequence
  Synthetic oligonucleotide
aucugugcccagcagugcucc

SEQ ID NO: 2527 - RNA, 21 nt, Artificial Sequence
  Synthetic oligonucleotide
cugugcccagcagugcuccgg

SEQ ID NO: 2528 - RNA, 21 nt, Artificial Sequence
  Synthetic oligonucleotide
gugcuccgggcgcugccgugg

SEQ ID NO: 2529 - RNA, 21 nt, Artificial Sequence
  Synthetic oligonucleotide
gagagcgacugccuggucugc

SEQ ID NO: 2530 - RNA, 21 nt, Artificial Sequence
  Synthetic oligonucleotide
cugccuggucugccgcaaauu

SEQ ID NO: 2531 - RNA, 21 nt, Artificial Sequence
  Synthetic oligonucleotide
gacagaucacggcucgugcgu

SEQ ID NO: 2532 - RNA, 21 nt, Artificial Sequence
  Synthetic oligonucleotide
ccgcaaaguguguaacggaau

SEQ ID NO: 2533 - RNA, 21 nt, Artificial Sequence
  Synthetic oligonucleotide
cggaauagguauuggugaauu

SEQ ID NO: 2534 - RNA, 21 nt, Artificial Sequence
  Synthetic oligonucleotide
cuacgaauauuaaacacuuca

SEQ ID NO: 2535 - RNA, 21 nt, Artificial Sequence
  Synthetic oligonucleotide
ccacaggaacuggauauucug

SEQ ID NO: 2536 - RNA, 21 nt, Artificial Sequence
  Synthetic oligonucleotide
cacaggguuuuugcugauuca

SEQ ID NO: 2537 - RNA, 21 nt, Artificial Sequence
  Synthetic oligonucleotide
uucaggaaacaaaaauuugug

SEQ ID NO: 2538 - RNA, 21 nt, Artificial Sequence
  Synthetic oligonucleotide
gugcuaugcaaauacaauaaa

SEQ ID NO: 2539 - RNA, 21 nt, Artificial Sequence
  Synthetic oligonucleotide
ccggucagaaaaccaaaauua

SEQ ID NO: 2540 - RNA, 21 nt, Artificial Sequence
  Synthetic oligonucleotide
cugcgucucuugccggaaugu

SEQ ID NO: 2541 - RNA, 21 nt, Artificial Sequence
  Synthetic oligonucleotide
gggcccuccucuugcugcugg

SEQ ID NO: 2542 - RNA, 21 nt, Artificial Sequence
  Synthetic oligonucleotide
ggcccuccucuugcugcuggu

SEQ ID NO: 2543 - RNA, 21 nt, Artificial Sequence
  Synthetic oligonucleotide
cuccucuugcugcugguggug

SEQ ID NO: 2544 - RNA, 21 nt, Artificial Sequence
  Synthetic oligonucleotide
uccucuugcugcugguggugg

SEQ ID NO: 2545 - RNA, 21 nt, Artificial Sequence
  Synthetic oligonucleotide
cggaagcgcacgcugcggagg

SEQ ID NO: 2546 - RNA, 21 nt, Artificial Sequence
  Synthetic oligonucleotide
aagcgcacgcugcggaggcug

SEQ ID NO: 2547 - RNA, 21 nt, Artificial Sequence
  Synthetic oligonucleotide
aacugaauucaaaaagaucaa

SEQ ID NO: 2548 - RNA, 21 nt, Artificial Sequence
  Synthetic oligonucleotide
caaagugcugggcuccggugc

SEQ ID NO: 2549 - RNA, 21 nt, Artificial Sequence
  Synthetic oligonucleotide
aagugcugggcuccggugcgu

SEQ ID NO: 2550 - RNA, 21 nt, Artificial Sequence
  Synthetic oligonucleotide
agugcugggcuccggugcguu

SEQ ID NO: 2551 - RNA, 21 nt, Artificial Sequence
  Synthetic oligonucleotide
gugcugggcuccggugcguuc

SEQ ID NO: 2552 - RNA, 21 nt, Artificial Sequence
  Synthetic oligonucleotide
ugcugggcuccggugcguucg

SEQ ID NO: 2553 - RNA, 21 nt, Artificial Sequence
  Synthetic oligonucleotide
cgugugccgccugcugggcau

SEQ ID NO: 2554 - RNA, 21 nt, Artificial Sequence
  Synthetic oligonucleotide
gugugccgccugcugggcauc

SEQ ID NO: 2555 - RNA, 21 nt, Artificial Sequence
  Synthetic oligonucleotide
gugccgccugcugggcaucug

SEQ ID NO: 2556 - RNA, 21 nt, Artificial Sequence
  Synthetic oligonucleotide
caccgugcagcucaucacgca

SEQ ID NO: 2557 - RNA, 21 nt, Artificial Sequence
  Synthetic oligonucleotide
cgugcagcucaucacgcagcu

SEQ ID NO: 2558 - RNA, 21 nt, Artificial Sequence
  Synthetic oligonucleotide
cagcucaucacgcagcucaug

SEQ ID NO: 2559 - RNA, 21 nt, Artificial Sequence
  Synthetic oligonucleotide
agcucaucacgcagcucaugc

SEQ ID NO: 2560 - RNA, 21 nt, Artificial Sequence
  Synthetic oligonucleotide
cagcucaugcccuucggcugc

SEQ ID NO: 2561 - RNA, 21 nt, Artificial Sequence
  Synthetic oligonucleotide
agcucaugcccuucggcugcc

SEQ ID NO: 2562 - RNA, 21 nt, Artificial Sequence
  Synthetic oligonucleotide
uuggaggaccgucgcuuggug

SEQ ID NO: 2563 - RNA, 21 nt, Artificial Sequence
  Synthetic oligonucleotide
ggaggaccgucgcuuggugca

SEQ ID NO: 2564 - RNA, 21 nt, Artificial Sequence
  Synthetic oligonucleotide
gaggaccgucgcuuggugcac

SEQ ID NO: 2565 - RNA, 21 nt, Artificial Sequence
  Synthetic oligonucleotide
aggaccgucgcuuggugcacc

SEQ ID NO: 2566 - RNA, 21 nt, Artificial Sequence
  Synthetic oligonucleotide
gaccgucgcuuggugcaccgc

SEQ ID NO: 2567 - RNA, 21 nt, Artificial Sequence
  Synthetic oligonucleotide
ccgucgcuuggugcaccgcga

SEQ ID NO: 2568 - RNA, 21 nt, Artificial Sequence
  Synthetic oligonucleotide
gucgcuuggugcaccgcgacc

SEQ ID NO: 2569 - RNA, 21 nt, Artificial Sequence
  Synthetic oligonucleotide
ucgcuuggugcaccgcgaccu

SEQ ID NO: 2570 - RNA, 21 nt, Artificial Sequence
  Synthetic oligonucleotide
gcuuggugcaccgcgaccugg

SEQ ID NO: 2571 - RNA, 21 nt, Artificial Sequence
  Synthetic oligonucleotide
ggcauuggaaucaauuuuaca

SEQ ID NO: 2572 - RNA, 21 nt, Artificial Sequence
  Synthetic oligonucleotide
ucaagugcuggaugauagacg

SEQ ID NO: 2573 - RNA, 21 nt, Artificial Sequence
  Synthetic oligonucleotide
aagugcuggaugauagacgca

SEQ ID NO: 2574 - RNA, 21 nt, Artificial Sequence
  Synthetic oligonucleotide
agugcuggaugauagacgcag

SEQ ID NO: 2575 - RNA, 21 nt, Artificial Sequence
  Synthetic oligonucleotide
ugcuggaugauagacgcagau

SEQ ID NO: 2576 - RNA, 21 nt, Artificial Sequence
  Synthetic oligonucleotide
cuccugagcucucugagugca

SEQ ID NO: 2577 - RNA, 21 nt, Artificial Sequence
  Synthetic oligonucleotide
cugagcucucugagugcaacc

SEQ ID NO: 2578 - RNA, 21 nt, Artificial Sequence
  Synthetic oligonucleotide
aagcugucccaucaaggaaga

SEQ ID NO: 2579 - RNA, 21 nt, Artificial Sequence
  Synthetic oligonucleotide
agcugucccaucaaggaagac

SEQ ID NO: 2580 - RNA, 21 nt, Artificial Sequence
  Synthetic oligonucleotide
aagacagcuucuugcagcgau

SEQ ID NO: 2581 - RNA, 21 nt, Artificial Sequence
  Synthetic oligonucleotide
agacagcuucuugcagcgaua

SEQ ID NO: 2582 - RNA, 21 nt, Artificial Sequence
  Synthetic oligonucleotide
gacagcuucuugcagcgauac

SEQ ID NO: 2583 - RNA, 21 nt, Artificial Sequence
  Synthetic oligonucleotide
acagcuucuugcagcgauaca

SEQ ID NO: 2584 - RNA, 21 nt, Artificial Sequence
  Synthetic oligonucleotide
cagcuucuugcagcgauacag

SEQ ID NO: 2585 - RNA, 21 nt, Artificial Sequence
  Synthetic oligonucleotide
gcuucuugcagcgauacagcu

SEQ ID NO: 2586 - RNA, 21 nt, Artificial Sequence
  Synthetic oligonucleotide
ccacaaagcagugaauuuauu

SEQ ID NO: 2587 - RNA, 21 nt, Artificial Sequence
  Synthetic oligonucleotide
guauauuugaaaaaaaaaaaa

SEQ ID NO: 2588 - RNA, 21 nt, Artificial Sequence
  Synthetic oligonucleotide
ugugaggauuuuuauugauug

SEQ ID NO: 2589 - RNA, 21 nt, Artificial Sequence
  Synthetic oligonucleotide
cgcuauugauuuuuacuucaa

SEQ ID NO: 2590 - RNA, 21 nt, Artificial Sequence
  Synthetic oligonucleotide
aaggaagaagcuugcugguag

SEQ ID NO: 2591 - RNA, 21 nt, Artificial Sequence
  Synthetic oligonucleotide
aggaagaagcuugcugguagc

SEQ ID NO: 2592 - RNA, 21 nt, Artificial Sequence
  Synthetic oligonucleotide
ggaagaagcuugcugguagca

SEQ ID NO: 2593 - RNA, 21 nt, Artificial Sequence
  Synthetic oligonucleotide
gaagaagcuugcugguagcac

SEQ ID NO: 2594 - RNA, 21 nt, Artificial Sequence
  Synthetic oligonucleotide
aagaagcuugcugguagcacu

SEQ ID NO: 2595 - RNA, 21 nt, Artificial Sequence
  Synthetic oligonucleotide
gaagcuugcugguagcacuug

SEQ ID NO: 2596 - RNA, 21 nt, Artificial Sequence
  Synthetic oligonucleotide
aagcuugcugguagcacuugc

SEQ ID NO: 2597 - RNA, 21 nt, Artificial Sequence
  Synthetic oligonucleotide
agcuugcugguagcacuugcu

SEQ ID NO: 2598 - RNA, 21 nt, Artificial Sequence
  Synthetic oligonucleotide
gcuugcugguagcacuugcua

SEQ ID NO: 2599 - RNA, 21 nt, Artificial Sequence
  Synthetic oligonucleotide
cuugcugguagcacuugcuac

SEQ ID NO: 2600 - RNA, 21 nt, Artificial Sequence
  Synthetic oligonucleotide
uugcugguagcacuugcuacc

SEQ ID NO: 2601 - RNA, 21 nt, Artificial Sequence
  Synthetic oligonucleotide
ggaugcuugauuccagugguu

SEQ ID NO: 2602 - RNA, 21 nt, Artificial Sequence
  Synthetic oligonucleotide
gaugcuugauuccagugguuc

SEQ ID NO: 2603 - RNA, 21 nt, Artificial Sequence
  Synthetic oligonucleotide
agcaggccggaucgguacugu

SEQ ID NO: 2604 - RNA, 21 nt, Artificial Sequence
  Synthetic oligonucleotide
gccggaucgguacuguaucaa

SEQ ID NO: 2605 - RNA, 21 nt, Artificial Sequence
  Synthetic oligonucleotide
uccuuagacuuacuuuuguaa

SEQ ID NO: 2606 - RNA, 21 nt, Artificial Sequence
  Synthetic oligonucleotide
cugucuugcugucaugaaauc

SEQ ID NO: 2607 - RNA, 21 nt, Artificial Sequence
  Synthetic oligonucleotide
ccuaaggauagcaccgcuuuu

SEQ ID NO: 2608 - RNA, 21 nt, Artificial Sequence
  Synthetic oligonucleotide
uaaggauagcaccgcuuuugu

SEQ ID NO: 2609 - RNA, 21 nt, Artificial Sequence
  Synthetic oligonucleotide
aaggauagcaccgcuuuuguu

SEQ ID NO: 2610 - RNA, 21 nt, Artificial Sequence
  Synthetic oligonucleotide
aggauagcaccgcuuuuguuc

SEQ ID NO: 2611 - RNA, 21 nt, Artificial Sequence
  Synthetic oligonucleotide
ggauagcaccgcuuuuguucu

SEQ ID NO: 2612 - RNA, 21 nt, Artificial Sequence
  Synthetic oligonucleotide
gauagcaccgcuuuuguucuc

SEQ ID NO: 2613 - RNA, 21 nt, Artificial Sequence
  Synthetic oligonucleotide
auagcaccgcuuuuguucucg

SEQ ID NO: 2614 - RNA, 21 nt, Artificial Sequence
  Synthetic oligonucleotide
uagcaccgcuuuuguucucgc

SEQ ID NO: 2615 - RNA, 21 nt, Artificial Sequence
  Synthetic oligonucleotide
agcaccgcuuuuguucucgca

SEQ ID NO: 2616 - RNA, 21 nt, Artificial Sequence
  Synthetic oligonucleotide
accgcuuuuguucucgcaaaa

SEQ ID NO: 2617 - RNA, 21 nt, Artificial Sequence
  Synthetic oligonucleotide
ccgcuuuuguucucgcaaaaa

SEQ ID NO: 2618 - RNA, 21 nt, Artificial Sequence
  Synthetic oligonucleotide
cgcuuuuguucucgcaaaaac

SEQ ID NO: 2619 - RNA, 21 nt, Artificial Sequence
  Synthetic oligonucleotide
gcuuuuguucucgcaaaaacg

SEQ ID NO: 2620 - RNA, 21 nt, Artificial Sequence
  Synthetic oligonucleotide
uguucucgcaaaaacguaucu

SEQ ID NO: 2621 - RNA, 21 nt, Artificial Sequence
  Synthetic oligonucleotide
caaaauuaguuuguguuacuu

SEQ ID NO: 2622 - RNA, 21 nt, Artificial Sequence
  Synthetic oligonucleotide
acuuauggaagauaguuuucu

SEQ ID NO: 2623 - RNA, 21 nt, Artificial Sequence
  Synthetic oligonucleotide
cuucaaaagcuuuuuacucaa

SEQ ID NO: 2624 - RNA, 21 nt, Artificial Sequence
  Synthetic oligonucleotide
aaacuaggguuugaaauugau

SEQ ID NO: 2625 - RNA, 21 nt, Artificial Sequence
  Synthetic oligonucleotide
ccuaaaauaauuucucuacaa

SEQ ID NO: 2626 - RNA, 21 nt, Artificial Sequence
  Synthetic oligonucleotide
aacagcaguccuuuguaaaca

SEQ ID NO: 2627 - RNA, 21 nt, Artificial Sequence
  Synthetic oligonucleotide
uccaauuuaucaaggaagaaa

SEQ ID NO: 2628 - RNA, 21 nt, Artificial Sequence
  Synthetic oligonucleotide
cauacaaaauguuccuuuugc

SEQ ID NO: 2629 - RNA, 21 nt, Artificial Sequence
  Synthetic oligonucleotide
auguuccuuuugcuuuuaaag

SEQ ID NO: 2630 - RNA, 21 nt, Artificial Sequence
  Synthetic oligonucleotide
uguuccuuuugcuuuuaaagu

SEQ ID NO: 2631 - RNA, 21 nt, Artificial Sequence
  Synthetic oligonucleotide
uuuugcuuuuaaaguaauuuu

SEQ ID NO: 2632 - RNA, 21 nt, Artificial Sequence
  Synthetic oligonucleotide
uuguuaagaaaguauuugauu

SEQ ID NO: 2633 - RNA, 21 nt, Artificial Sequence
  Synthetic oligonucleotide
auuuggaaauuaccuaugugc

SEQ ID NO: 2634 - RNA, 21 nt, Artificial Sequence
  Synthetic oligonucleotide
uuuggaaauuaccuaugugca

SEQ ID NO: 2635 - RNA, 21 nt, Artificial Sequence
  Synthetic oligonucleotide
aucuuuccuucuuaaagacca

SEQ ID NO: 2636 - RNA, 21 nt, Artificial Sequence
  Synthetic oligonucleotide
ucuuuccuucuuaaagaccau

SEQ ID NO: 2637 - RNA, 21 nt, Artificial Sequence
  Synthetic oligonucleotide
cuuuccuucuuaaagaccauc

SEQ ID NO: 2638 - RNA, 21 nt, Artificial Sequence
  Synthetic oligonucleotide
uuuccuucuuaaagaccaucc

SEQ ID NO: 2639 - RNA, 21 nt, Artificial Sequence
  Synthetic oligonucleotide
uuccuucuuaaagaccaucca

SEQ ID NO: 2640 - RNA, 21 nt, Artificial Sequence
  Synthetic oligonucleotide
uccuucuuaaagaccauccag

SEQ ID NO: 2641 - RNA, 21 nt, Artificial Sequence
  Synthetic oligonucleotide
ccuucuuaaagaccauccagg

SEQ ID NO: 2642 - RNA, 21 nt, Artificial Sequence
  Synthetic oligonucleotide
cuucuuaaagaccauccagga

SEQ ID NO: 2643 - RNA, 21 nt, Artificial Sequence
  Synthetic oligonucleotide
uucuuaaagaccauccaggag

SEQ ID NO: 2644 - RNA, 21 nt, Artificial Sequence
  Synthetic oligonucleotide
ucuuaaagaccauccaggagg

SEQ ID NO: 2645 - RNA, 21 nt, Artificial Sequence
  Synthetic oligonucleotide
cuuaaagaccauccaggaggu

SEQ ID NO: 2646 - RNA, 21 nt, Artificial Sequence
  Synthetic oligonucleotide
uuaaagaccauccaggaggug

SEQ ID NO: 2647 - RNA, 21 nt, Artificial Sequence
  Synthetic oligonucleotide
uaaagaccauccaggaggugg

SEQ ID NO: 2648 - RNA, 21 nt, Artificial Sequence
  Synthetic oligonucleotide
aaagaccauccaggagguggc

SEQ ID NO: 2649 - RNA, 21 nt, Artificial Sequence
  Synthetic oligonucleotide
agugugauccaagcuguccca

SEQ ID NO: 2650 - RNA, 21 nt, Artificial Sequence
  Synthetic oligonucleotide
gugugauccaagcugucccaa

SEQ ID NO: 2651 - RNA, 21 nt, Artificial Sequence
  Synthetic oligonucleotide
ugugauccaagcugucccaau

SEQ ID NO: 2652 - RNA, 21 nt, Artificial Sequence
  Synthetic oligonucleotide
gugauccaagcugucccaaug

SEQ ID NO: 2653 - RNA, 21 nt, Artificial Sequence
  Synthetic oligonucleotide
ugauccaagcugucccaaugg

SEQ ID NO: 2654 - RNA, 21 nt, Artificial Sequence
  Synthetic oligonucleotide
gcaggagaggagaacugccag

SEQ ID NO: 2655 - RNA, 21 nt, Artificial Sequence
  Synthetic oligonucleotide
caggagaggagaacugccaga

SEQ ID NO: 2656 - RNA, 21 nt, Artificial Sequence
  Synthetic oligonucleotide
aggagaggagaacugccagaa

SEQ ID NO: 2657 - RNA, 21 nt, Artificial Sequence
  Synthetic oligonucleotide
ggagaggagaacugccagaaa

SEQ ID NO: 2658 - RNA, 21 nt, Artificial Sequence
  Synthetic oligonucleotide
acugaccaaaaucaucugugc

SEQ ID NO: 2659 - RNA, 21 nt, Artificial Sequence
  Synthetic oligonucleotide
cugaccaaaaucaucugugcc

SEQ ID NO: 2660 - RNA, 21 nt, Artificial Sequence
  Synthetic oligonucleotide
ugaccaaaaucaucugugccc

SEQ ID NO: 2661 - RNA, 21 nt, Artificial Sequence
  Synthetic oligonucleotide
gaccaaaaucaucugugccca

SEQ ID NO: 2662 - RNA, 21 nt, Artificial Sequence
  Synthetic oligonucleotide
accaaaaucaucugugcccag

SEQ ID NO: 2663 - RNA, 21 nt, Artificial Sequence
  Synthetic oligonucleotide
ccaaaaucaucugugcccagc

SEQ ID NO: 2664 - RNA, 21 nt, Artificial Sequence
  Synthetic oligonucleotide
caaaaucaucugugcccagca

SEQ ID NO: 2665 - RNA, 21 nt, Artificial Sequence
  Synthetic oligonucleotide
cccagugacugcugccacaac

SEQ ID NO: 2666 - RNA, 21 nt, Artificial Sequence
  Synthetic oligonucleotide
ccagugacugcugccacaacc

SEQ ID NO: 2667 - RNA, 21 nt, Artificial Sequence
  Synthetic oligonucleotide
cagugacugcugccacaacca

SEQ ID NO: 2668 - RNA, 21 nt, Artificial Sequence
  Synthetic oligonucleotide
cucacucuccauaaaugcuac

SEQ ID NO: 2669 - RNA, 21 nt, Artificial Sequence
  Synthetic oligonucleotide
gguuuuugcugauucaggcuu

SEQ ID NO: 2670 - RNA, 21 nt, Artificial Sequence
  Synthetic oligonucleotide
guuuuugcugauucaggcuug

SEQ ID NO: 2671 - RNA, 21 nt, Artificial Sequence
  Synthetic oligonucleotide
uuuuugcugauucaggcuugg

SEQ ID NO: 2672 - RNA, 21 nt, Artificial Sequence
  Synthetic oligonucleotide
uuuugcugauucaggcuuggc

SEQ ID NO: 2673 - RNA, 21 nt, Artificial Sequence
  Synthetic oligonucleotide
uuugcugauucaggcuuggcc

SEQ ID NO: 2674 - RNA, 21 nt, Artificial Sequence
  Synthetic oligonucleotide
uugcugauucaggcuuggccu

SEQ ID NO: 2675 - RNA, 21 nt, Artificial Sequence
  Synthetic oligonucleotide
ugcugauucaggcuuggccug

SEQ ID NO: 2676 - RNA, 21 nt, Artificial Sequence
  Synthetic oligonucleotide
gcugauucaggcuuggccuga

SEQ ID NO: 2677 - RNA, 21 nt, Artificial Sequence
  Synthetic oligonucleotide
ccaagcaacauggucaguuuu

SEQ ID NO: 2678 - RNA, 21 nt, Artificial Sequence
  Synthetic oligonucleotide
caagcaacauggucaguuuuc

SEQ ID NO: 2679 - RNA, 21 nt, Artificial Sequence
  Synthetic oligonucleotide
aagcaacauggucaguuuucu

SEQ ID NO: 2680 - RNA, 21 nt, Artificial Sequence
  Synthetic oligonucleotide
uacaauaaacuggaaaaaacu

SEQ ID NO: 2681 - RNA, 21 nt, Artificial Sequence
  Synthetic oligonucleotide
cucaggccaugaacaucaccu

SEQ ID NO: 2682 - RNA, 21 nt, Artificial Sequence
  Synthetic oligonucleotide
ucaggccaugaacaucaccug

SEQ ID NO: 2683 - RNA, 21 nt, Artificial Sequence
  Synthetic oligonucleotide
guauccagugugcccacuaca

SEQ ID NO: 2684 - RNA, 21 nt, Artificial Sequence
  Synthetic oligonucleotide
uauccagugugcccacuacau

SEQ ID NO: 2685 - RNA, 21 nt, Artificial Sequence
  Synthetic oligonucleotide
auccagugugcccacuacauu

SEQ ID NO: 2686 - RNA, 21 nt, Artificial Sequence
  Synthetic oligonucleotide
uccagugugcccacuacauug

SEQ ID NO: 2687 - RNA, 21 nt, Artificial Sequence
  Synthetic oligonucleotide
ccagugugcccacuacauuga

SEQ ID NO: 2688 - RNA, 21 nt, Artificial Sequence
  Synthetic oligonucleotide
cugaauucaaaaagaucaaag

SEQ ID NO: 2689 - RNA, 21 nt, Artificial Sequence
  Synthetic oligonucleotide
ugaauucaaaaagaucaaagu

SEQ ID NO: 2690 - RNA, 21 nt, Artificial Sequence
  Synthetic oligonucleotide
gacucuggaucccagaaggug

SEQ ID NO: 2691 - RNA, 21 nt, Artificial Sequence
  Synthetic oligonucleotide
acucuggaucccagaagguga

SEQ ID NO: 2692 - RNA, 21 nt, Artificial Sequence
  Synthetic oligonucleotide
cucuggaucccagaaggugag

SEQ ID NO: 2693 - RNA, 21 nt, Artificial Sequence
  Synthetic oligonucleotide
ucuggaucccagaaggugaga

SEQ ID NO: 2694 - RNA, 21 nt, Artificial Sequence
  Synthetic oligonucleotide
cuggaucccagaaggugagaa

SEQ ID NO: 2695 - RNA, 21 nt, Artificial Sequence
  Synthetic oligonucleotide
uggaucccagaaggugagaaa

SEQ ID NO: 2696 - RNA, 21 nt, Artificial Sequence
  Synthetic oligonucleotide
ggaucccagaaggugagaaag

SEQ ID NO: 2697 - RNA, 21 nt, Artificial Sequence
  Synthetic oligonucleotide
gaucccagaaggugagaaagu

SEQ ID NO: 2698 - RNA, 21 nt, Artificial Sequence
  Synthetic oligonucleotide
cgcagcaugucaagaucacag

SEQ ID NO: 2699 - RNA, 21 nt, Artificial Sequence
  Synthetic oligonucleotide
gcagcaugucaagaucacaga

SEQ ID NO: 2700 - RNA, 21 nt, Artificial Sequence
  Synthetic oligonucleotide
cagcaugucaagaucacagau

SEQ ID NO: 2701 - RNA, 21 nt, Artificial Sequence
  Synthetic oligonucleotide
agcaugucaagaucacagauu

SEQ ID NO: 2702 - RNA, 21 nt, Artificial Sequence
  Synthetic oligonucleotide
gcaugucaagaucacagauuu

SEQ ID NO: 2703 - RNA, 21 nt, Artificial Sequence
  Synthetic oligonucleotide
caugucaagaucacagauuuu

SEQ ID NO: 2704 - RNA, 21 nt, Artificial Sequence
  Synthetic oligonucleotide
augucaagaucacagauuuug

SEQ ID NO: 2705 - RNA, 21 nt, Artificial Sequence
  Synthetic oligonucleotide
ugucaagaucacagauuuugg

SEQ ID NO: 2706 - RNA, 21 nt, Artificial Sequence
  Synthetic oligonucleotide
gucaagaucacagauuuuggg

SEQ ID NO: 2707 - RNA, 21 nt, Artificial Sequence
  Synthetic oligonucleotide
ucaagaucacagauuuugggc

SEQ ID NO: 2708 - RNA, 21 nt, Artificial Sequence
  Synthetic oligonucleotide
caagaucacagauuuugggcu

SEQ ID NO: 2709 - RNA, 21 nt, Artificial Sequence
  Synthetic oligonucleotide
aagaucacagauuuugggcug

SEQ ID NO: 2710 - RNA, 21 nt, Artificial Sequence
  Synthetic oligonucleotide
agaucacagauuuugggcugg

SEQ ID NO: 2711 - RNA, 21 nt, Artificial Sequence
  Synthetic oligonucleotide
gaucacagauuuugggcuggc

SEQ ID NO: 2712 - RNA, 21 nt, Artificial Sequence
  Synthetic oligonucleotide
aucacagauuuugggcuggcc

SEQ ID NO: 2713 - RNA, 21 nt, Artificial Sequence
  Synthetic oligonucleotide
ucacagauuuugggcuggcca

SEQ ID NO: 2714 - RNA, 21 nt, Artificial Sequence
  Synthetic oligonucleotide
cacagauuuugggcuggccaa

SEQ ID NO: 2715 - RNA, 21 nt, Artificial Sequence
  Synthetic oligonucleotide
acagauuuugggcuggccaaa

SEQ ID NO: 2716 - RNA, 21 nt, Artificial Sequence
  Synthetic oligonucleotide
cagauuuugggcuggccaaac

SEQ ID NO: 2717 - RNA, 21 nt, Artificial Sequence
  Synthetic oligonucleotide
agauuuugggcuggccaaacu

SEQ ID NO: 2718 - RNA, 21 nt, Artificial Sequence
  Synthetic oligonucleotide
gauuuugggcuggccaaacug

SEQ ID NO: 2719 - RNA, 21 nt, Artificial Sequence
  Synthetic oligonucleotide
auuuugggcuggccaaacugc

SEQ ID NO: 2720 - RNA, 21 nt, Artificial Sequence
  Synthetic oligonucleotide
uuuugggcuggccaaacugcu

SEQ ID NO: 2721 - RNA, 21 nt, Artificial Sequence
  Synthetic oligonucleotide
aggcaaagugccuaucaagug

SEQ ID NO: 2722 - RNA, 21 nt, Artificial Sequence
  Synthetic oligonucleotide
ggcaaagugccuaucaagugg

SEQ ID NO: 2723 - RNA, 21 nt, Artificial Sequence
  Synthetic oligonucleotide
gcaaagugccuaucaagugga

SEQ ID NO: 2724 - RNA, 21 nt, Artificial Sequence
  Synthetic oligonucleotide
caaagugccuaucaaguggau

SEQ ID NO: 2725 - RNA, 21 nt, Artificial Sequence
  Synthetic oligonucleotide
aaagugccuaucaaguggaug

SEQ ID NO: 2726 - RNA, 21 nt, Artificial Sequence
  Synthetic oligonucleotide
aagugccuaucaaguggaugg

SEQ ID NO: 2727 - RNA, 21 nt, Artificial Sequence
  Synthetic oligonucleotide
agugccuaucaaguggauggc

SEQ ID NO: 2728 - RNA, 21 nt, Artificial Sequence
  Synthetic oligonucleotide
guaccaucgaugucuacauga

SEQ ID NO: 2729 - RNA, 21 nt, Artificial Sequence
  Synthetic oligonucleotide
uaccaucgaugucuacaugau

SEQ ID NO: 2730 - RNA, 21 nt, Artificial Sequence
  Synthetic oligonucleotide
accaucgaugucuacaugauc

SEQ ID NO: 2731 - RNA, 21 nt, Artificial Sequence
  Synthetic oligonucleotide
ccaucgaugucuacaugauca

SEQ ID NO: 2732 - RNA, 21 nt, Artificial Sequence
  Synthetic oligonucleotide
caucgaugucuacaugaucau

SEQ ID NO: 2733 - RNA, 21 nt, Artificial Sequence
  Synthetic oligonucleotide
aucgaugucuacaugaucaug

SEQ ID NO: 2734 - RNA, 21 nt, Artificial Sequence
  Synthetic oligonucleotide
ucgaugucuacaugaucaugg

SEQ ID NO: 2735 - RNA, 21 nt, Artificial Sequence
  Synthetic oligonucleotide
cgaugucuacaugaucauggu

SEQ ID NO: 2736 - RNA, 21 nt, Artificial Sequence
  Synthetic oligonucleotide
gaugucuacaugaucaugguc

SEQ ID NO: 2737 - RNA, 21 nt, Artificial Sequence
  Synthetic oligonucleotide
augucuacaugaucaugguca

SEQ ID NO: 2738 - RNA, 21 nt, Artificial Sequence
  Synthetic oligonucleotide
ugucuacaugaucauggucaa

SEQ ID NO: 2739 - RNA, 21 nt, Artificial Sequence
  Synthetic oligonucleotide
gucuacaugaucauggucaag

SEQ ID NO: 2740 - RNA, 21 nt, Artificial Sequence
  Synthetic oligonucleotide
ucuacaugaucauggucaagu

SEQ ID NO: 2741 - RNA, 21 nt, Artificial Sequence
  Synthetic oligonucleotide
cuacaugaucauggucaagug

SEQ ID NO: 2742 - RNA, 21 nt, Artificial Sequence
  Synthetic oligonucleotide
uacaugaucauggucaagugc

SEQ ID NO: 2743 - RNA, 21 nt, Artificial Sequence
  Synthetic oligonucleotide
acaugaucauggucaagugcu

SEQ ID NO: 2744 - RNA, 21 nt, Artificial Sequence
  Synthetic oligonucleotide
caugaucauggucaagugcug

SEQ ID NO: 2745 - RNA, 21 nt, Artificial Sequence
  Synthetic oligonucleotide
augaucauggucaagugcugg

SEQ ID NO: 2746 - RNA, 21 nt, Artificial Sequence
  Synthetic oligonucleotide
ugaucauggucaagugcugga

SEQ ID NO: 2747 - RNA, 21 nt, Artificial Sequence
  Synthetic oligonucleotide
gaucauggucaagugcuggau

SEQ ID NO: 2748 - RNA, 21 nt, Artificial Sequence
  Synthetic oligonucleotide
aucauggucaagugcuggaug

SEQ ID NO: 2749 - RNA, 21 nt, Artificial Sequence
  Synthetic oligonucleotide
ucauggucaagugcuggauga

SEQ ID NO: 2750 - RNA, 21 nt, Artificial Sequence
  Synthetic oligonucleotide
cauggucaagugcuggaugau

SEQ ID NO: 2751 - RNA, 21 nt, Artificial Sequence
  Synthetic oligonucleotide
auggucaagugcuggaugaua

SEQ ID NO: 2752 - RNA, 21 nt, Artificial Sequence
  Synthetic oligonucleotide
uggucaagugcuggaugauag

SEQ ID NO: 2753 - RNA, 21 nt, Artificial Sequence
  Synthetic oligonucleotide
ggucaagugcuggaugauaga

SEQ ID NO: 2754 - RNA, 21 nt, Artificial Sequence
  Synthetic oligonucleotide
ucgaauucuccaaaauggccc

SEQ ID NO: 2755 - RNA, 21 nt, Artificial Sequence
  Synthetic oligonucleotide
cgaauucuccaaaauggcccg

SEQ ID NO: 2756 - RNA, 21 nt, Artificial Sequence
  Synthetic oligonucleotide
gggaugaaagaaugcauuugc

SEQ ID NO: 2757 - RNA, 21 nt, Artificial Sequence
  Synthetic oligonucleotide
ggaugaaagaaugcauuugcc

SEQ ID NO: 2758 - RNA, 21 nt, Artificial Sequence
  Synthetic oligonucleotide
gaugaaagaaugcauuugcca

SEQ ID NO: 2759 - RNA, 21 nt, Artificial Sequence
  Synthetic oligonucleotide
augaaagaaugcauuugccaa

SEQ ID NO: 2760 - RNA, 21 nt, Artificial Sequence
  Synthetic oligonucleotide
ugaaagaaugcauuugccaag

SEQ ID NO: 2761 - RNA, 21 nt, Artificial Sequence
  Synthetic oligonucleotide
uggacaacccugacuaccagc

SEQ ID NO: 2762 - RNA, 21 nt, Artificial Sequence
  Synthetic oligonucleotide
ggacaacccugacuaccagca

SEQ ID NO: 2763 - RNA, 21 nt, Artificial Sequence
  Synthetic oligonucleotide
gacaacccugacuaccagcag

SEQ ID NO: 2764 - RNA, 21 nt, Artificial Sequence
  Synthetic oligonucleotide
acaacccugacuaccagcagg

SEQ ID NO: 2765 - RNA, 21 nt, Artificial Sequence
  Synthetic oligonucleotide
caacccugacuaccagcagga

SEQ ID NO: 2766 - RNA, 21 nt, Artificial Sequence
  Synthetic oligonucleotide
aacccugacuaccagcaggac

SEQ ID NO: 2767 - RNA, 21 nt, Artificial Sequence
  Synthetic oligonucleotide
acccugacuaccagcaggacu

SEQ ID NO: 2768 - RNA, 21 nt, Artificial Sequence
  Synthetic oligonucleotide
cccugacuaccagcaggacuu

SEQ ID NO: 2769 - RNA, 19 nt, Artificial Sequence
  Synthetic oligonucleotide
cgcagcgcggccgcagcag

SEQ ID NO: 2770 - RNA, 19 nt, Artificial Sequence
  Synthetic oligonucleotide
gcagcgcggccgcagcagc

SEQ ID NO: 2771 - RNA, 19 nt, Artificial Sequence
  Synthetic oligonucleotide
agcgcggccgcagcagccu

SEQ ID NO: 2772 - RNA, 19 nt, Artificial Sequence
  Synthetic oligonucleotide
gcgcuccuggcgcugcugg

SEQ ID NO: 2773 - RNA, 19 nt, Artificial Sequence
  Synthetic oligonucleotide
gcuccuggcgcugcuggcu

SEQ ID NO: 2774 - RNA, 19 nt, Artificial Sequence
  Synthetic oligonucleotide
uccuggcgcugcuggcugc

SEQ ID NO: 2775 - RNA, 19 nt, Artificial Sequence
  Synthetic oligonucleotide
guugggcacuuuugaagau

SEQ ID NO: 2776 - RNA, 19 nt, Artificial Sequence
  Synthetic oligonucleotide
ggaauuuggaaauuaccua

SEQ ID NO: 2777 - RNA, 19 nt, Artificial Sequence
  Synthetic oligonucleotide
uuaugaucuuuccuucuua

SEQ ID NO: 2778 - RNA, 19 nt, Artificial Sequence
  Synthetic oligonucleotide
ggcugguuauguccucauu

SEQ ID NO: 2779 - RNA, 19 nt, Artificial Sequence
  Synthetic oligonucleotide
cccaugagaaauuuacagg

SEQ ID NO: 2780 - RNA, 19 nt, Artificial Sequence
  Synthetic oligonucleotide
ugcauggcgccgugcgguu

SEQ ID NO: 2781 - RNA, 19 nt, Artificial Sequence
  Synthetic oligonucleotide
gcgccgugcgguucagcaa

SEQ ID NO: 2782 - RNA, 19 nt, Artificial Sequence
  Synthetic oligonucleotide
gcgccgugcgguucagcaa

SEQ ID NO: 2783 - RNA, 19 nt, Artificial Sequence
  Synthetic oligonucleotide
gccgugcgguucagcaaca

SEQ ID NO: 2784 - RNA, 19 nt, Artificial Sequence
  Synthetic oligonucleotide
ccgugcgguucagcaacaa

SEQ ID NO: 2785 - RNA, 19 nt, Artificial Sequence
  Synthetic oligonucleotide
gcugccaaaagugugaucc

SEQ ID NO: 2786 - RNA, 19 nt, Artificial Sequence
  Synthetic oligonucleotide
cugugcccagcagugcucc

SEQ ID NO: 2787 - RNA, 19 nt, Artificial Sequence
  Synthetic oligonucleotide
gugcccagcagugcuccgg

SEQ ID NO: 2788 - RNA, 19 nt, Artificial Sequence
  Synthetic oligonucleotide
gcuccgggcgcugccgugg

SEQ ID NO: 2789 - RNA, 19 nt, Artificial Sequence
  Synthetic oligonucleotide
gagcgacugccuggucugc

SEQ ID NO: 2790 - RNA, 19 nt, Artificial Sequence
  Synthetic oligonucleotide
gccuggucugccgcaaauu

SEQ ID NO: 2791 - RNA, 19 nt, Artificial Sequence
  Synthetic oligonucleotide
cagaucacggcucgugcgu

SEQ ID NO: 2792 - RNA, 19 nt, Artificial Sequence
  Synthetic oligonucleotide
gcaaaguguguaacggaau

SEQ ID NO: 2793 - RNA, 19 nt, Artificial Sequence
  Synthetic oligonucleotide
gaauagguauuggugaauu

SEQ ID NO: 2794 - RNA, 19 nt, Artificial Sequence
  Synthetic oligonucleotide
acgaauauuaaacacuuca

SEQ ID NO: 2795 - RNA, 19 nt, Artificial Sequence
  Synthetic oligonucleotide
acaggaacuggauauucug

SEQ ID NO: 2796 - RNA, 19 nt, Artificial Sequence
  Synthetic oligonucleotide
caggguuuuugcugauuca

SEQ ID NO: 2797 - RNA, 19 nt, Artificial Sequence
  Synthetic oligonucleotide
caggaaacaaaaauuugug

SEQ ID NO: 2798 - RNA, 19 nt, Artificial Sequence
  Synthetic oligonucleotide
gcuaugcaaauacaauaaa

SEQ ID NO: 2799 - RNA, 19 nt, Artificial Sequence
  Synthetic oligonucleotide
ggucagaaaaccaaaauua

SEQ ID NO: 2800 - RNA, 19 nt, Artificial Sequence
  Synthetic oligonucleotide
gcgucucuugccggaaugu

SEQ ID NO: 2801 - RNA, 19 nt, Artificial Sequence
  Synthetic oligonucleotide
gcccuccucuugcugcugg

SEQ ID NO: 2802 - RNA, 19 nt, Artificial Sequence
  Synthetic oligonucleotide
cccuccucuugcugcuggu

SEQ ID NO: 2803 - RNA, 19 nt, Artificial Sequence
  Synthetic oligonucleotide
ccucuugcugcugguggug

SEQ ID NO: 2804 - RNA, 19 nt, Artificial Sequence
  Synthetic oligonucleotide
cucuugcugcugguggugg

SEQ ID NO: 2805 - RNA, 19 nt, Artificial Sequence
  Synthetic oligonucleotide
gaagcgcacgcugcggagg

SEQ ID NO: 2806 - RNA, 19 nt, Artificial Sequence
  Synthetic oligonucleotide
gcgcacgcugcggaggcug

SEQ ID NO: 2807 - RNA, 19 nt, Artificial Sequence
  Synthetic oligonucleotide
cugaauucaaaaagaucaa

SEQ ID NO: 2808 - RNA, 19 nt, Artificial Sequence
  Synthetic oligonucleotide
aagugcugggcuccggugc

SEQ ID NO: 2809 - RNA, 19 nt, Artificial Sequence
  Synthetic oligonucleotide
gugcugggcuccggugcgu

SEQ ID NO: 2810 - RNA, 19 nt, Artificial Sequence
  Synthetic oligonucleotide
ugcugggcuccggugcguu

SEQ ID NO: 2811 - RNA, 19 nt, Artificial Sequence
  Synthetic oligonucleotide
gcugggcuccggugcguuc

SEQ ID NO: 2812 - RNA, 19 nt, Artificial Sequence
  Synthetic oligonucleotide
cugggcuccggugcguucg

SEQ ID NO: 2813 - RNA, 19 nt, Artificial Sequence
  Synthetic oligonucleotide
ugugccgccugcugggcau

SEQ ID NO: 2814 - RNA, 19 nt, Artificial Sequence
  Synthetic oligonucleotide
gugccgccugcugggcauc

SEQ ID NO: 2815 - RNA, 19 nt, Artificial Sequence
  Synthetic oligonucleotide
gccgccugcugggcaucug

SEQ ID NO: 2816 - RNA, 19 nt, Artificial Sequence
  Synthetic oligonucleotide
ccgugcagcucaucacgca

SEQ ID NO: 2817 - RNA, 19 nt, Artificial Sequence
  Synthetic oligonucleotide
ugcagcucaucacgcagcu

SEQ ID NO: 2818 - RNA, 19 nt, Artificial Sequence
  Synthetic oligonucleotide
gcucaucacgcagcucaug

SEQ ID NO: 2819 - RNA, 19 nt, Artificial Sequence
  Synthetic oligonucleotide
cucaucacgcagcucaugc

SEQ ID NO: 2820 - RNA, 19 nt, Artificial Sequence
  Synthetic oligonucleotide
gcucaugcccuucggcugc

SEQ ID NO: 2821 - RNA, 19 nt, Artificial Sequence
  Synthetic oligonucleotide
cucaugcccuucggcugcc

SEQ ID NO: 2822 - RNA, 19 nt, Artificial Sequence
  Synthetic oligonucleotide
ggaggaccgucgcuuggug

SEQ ID NO: 2823 - RNA, 19 nt, Artificial Sequence
  Synthetic oligonucleotide
aggaccgucgcuuggugca

SEQ ID NO: 2824 - RNA, 19 nt, Artificial Sequence
  Synthetic oligonucleotide
ggaccgucgcuuggugcac

SEQ ID NO: 2825 - RNA, 19 nt, Artificial Sequence
  Synthetic oligonucleotide
gaccgucgcuuggugcacc

SEQ ID NO: 2826 - RNA, 19 nt, Artificial Sequence
  Synthetic oligonucleotide
ccgucgcuuggugcaccgc

SEQ ID NO: 2827 - RNA, 19 nt, Artificial Sequence
  Synthetic oligonucleotide
gucgcuuggugcaccgcga

SEQ ID NO: 2828 - RNA, 19 nt, Artificial Sequence
  Synthetic oligonucleotide
cgcuuggugcaccgcgacc

SEQ ID NO: 2829 - RNA, 19 nt, Artificial Sequence
  Synthetic oligonucleotide
gcuuggugcaccgcgaccu

SEQ ID NO: 2830 - RNA, 19 nt, Artificial Sequence
  Synthetic oligonucleotide
uuggugcaccgcgaccugg

SEQ ID NO: 2831 - RNA, 19 nt, Artificial Sequence
  Synthetic oligonucleotide
cauuggaaucaauuuuaca

SEQ ID NO: 2832 - RNA, 19 nt, Artificial Sequence
  Synthetic oligonucleotide
aagugcuggaugauagacg

SEQ ID NO: 2833 - RNA, 19 nt, Artificial Sequence
  Synthetic oligonucleotide
gugcuggaugauagacgca

SEQ ID NO: 2834 - RNA, 19 nt, Artificial Sequence
  Synthetic oligonucleotide
ugcuggaugauagacgcag

SEQ ID NO: 2835 - RNA, 19 nt, Artificial Sequence
  Synthetic oligonucleotide
cuggaugauagacgcagau

SEQ ID NO: 2836 - RNA, 19 nt, Artificial Sequence
  Synthetic oligonucleotide
ccugagcucucugagugca

SEQ ID NO: 2837 - RNA, 19 nt, Artificial Sequence
  Synthetic oligonucleotide
gagcucucugagugcaacc

SEQ ID NO: 2838 - RNA, 19 nt, Artificial Sequence
  Synthetic oligonucleotide
gcugucccaucaaggaaga

SEQ ID NO: 2839 - RNA, 19 nt, Artificial Sequence
  Synthetic oligonucleotide
cugucccaucaaggaagac

SEQ ID NO: 2840 - RNA, 19 nt, Artificial Sequence
  Synthetic oligonucleotide
gacagcuucuugcagcgau

SEQ ID NO: 2841 - RNA, 19 nt, Artificial Sequence
  Synthetic oligonucleotide
acagcuucuugcagcgaua

SEQ ID NO: 2842 - RNA, 19 nt, Artificial Sequence
  Synthetic oligonucleotide
cagcuucuugcagcgauac

SEQ ID NO: 2843 - RNA, 19 nt, Artificial Sequence
  Synthetic oligonucleotide
agcuucuugcagcgauaca

SEQ ID NO: 2844 - RNA, 19 nt, Artificial Sequence
  Synthetic oligonucleotide
gcuucuugcagcgauacag

SEQ ID NO: 2845 - RNA, 19 nt, Artificial Sequence
  Synthetic oligonucleotide
uucuugcagcgauacagcu

SEQ ID NO: 2846 - RNA, 19 nt, Artificial Sequence
  Synthetic oligonucleotide
acaaagcagugaauuuauu

SEQ ID NO: 2847 - RNA, 19 nt, Artificial Sequence
  Synthetic oligonucleotide
auauuugaaaaaaaaaaaa

SEQ ID NO: 2848 - RNA, 19 nt, Artificial Sequence
  Synthetic oligonucleotide
ugaggauuuuuauugauug

SEQ ID NO: 2849 - RNA, 19 nt, Artificial Sequence
  Synthetic oligonucleotide
cuauugauuuuuacuucaa

SEQ ID NO: 2850 - RNA, 19 nt, Artificial Sequence
  Synthetic oligonucleotide
ggaagaagcuugcugguag

SEQ ID NO: 2851 - RNA, 19 nt, Artificial Sequence
  Synthetic oligonucleotide
gaagaagcuugcugguagc

SEQ ID NO: 2852 - RNA, 19 nt, Artificial Sequence
  Synthetic oligonucleotide
aagaagcuugcugguagca

SEQ ID NO: 2853 - RNA, 19 nt, Artificial Sequence
  Synthetic oligonucleotide
agaagcuugcugguagcac

SEQ ID NO: 2854 - RNA, 19 nt, Artificial Sequence
  Synthetic oligonucleotide
gaagcuugcugguagcacu

SEQ ID NO: 2855 - RNA, 19 nt, Artificial Sequence
  Synthetic oligonucleotide
agcuugcugguagcacuug

SEQ ID NO: 2856 - RNA, 19 nt, Artificial Sequence
  Synthetic oligonucleotide
gcuugcugguagcacuugc

SEQ ID NO: 2857 - RNA, 19 nt, Artificial Sequence
  Synthetic oligonucleotide
cuugcugguagcacuugcu

SEQ ID NO: 2858 - RNA, 19 nt, Artificial Sequence
  Synthetic oligonucleotide
uugcugguagcacuugcua

SEQ ID NO: 2859 - RNA, 19 nt, Artificial Sequence
  Synthetic oligonucleotide
ugcugguagcacuugcuac

SEQ ID NO: 2860 - RNA, 19 nt, Artificial Sequence
  Synthetic oligonucleotide
gcugguagcacuugcuacc

SEQ ID NO: 2861 - RNA, 19 nt, Artificial Sequence
  Synthetic oligonucleotide
augcuugauuccagugguu

SEQ ID NO: 2862 - RNA, 19 nt, Artificial Sequence
  Synthetic oligonucleotide
ugcuugauuccagugguuc

SEQ ID NO: 2863 - RNA, 19 nt, Artificial Sequence
  Synthetic oligonucleotide
caggccggaucgguacugu

SEQ ID NO: 2864 - RNA, 19 nt, Artificial Sequence
  Synthetic oligonucleotide
cggaucgguacuguaucaa

SEQ ID NO: 2865 - RNA, 19 nt, Artificial Sequence
  Synthetic oligonucleotide
cuuagacuuacuuuuguaa

SEQ ID NO: 2866 - RNA, 19 nt, Artificial Sequence
  Synthetic oligonucleotide
gucuugcugucaugaaauc

SEQ ID NO: 2867 - RNA, 19 nt, Artificial Sequence
  Synthetic oligonucleotide
uaaggauagcaccgcuuuu

SEQ ID NO: 2868 - RNA, 19 nt, Artificial Sequence
  Synthetic oligonucleotide
aggauagcaccgcuuuugu

SEQ ID NO: 2869 - RNA, 19 nt, Artificial Sequence
  Synthetic oligonucleotide
ggauagcaccgcuuuuguu

SEQ ID NO: 2870 - RNA, 19 nt, Artificial Sequence
  Synthetic oligonucleotide
gauagcaccgcuuuuguuc

SEQ ID NO: 2871 - RNA, 19 nt, Artificial Sequence
  Synthetic oligonucleotide
auagcaccgcuuuuguucu

SEQ ID NO: 2872 - RNA, 19 nt, Artificial Sequence
  Synthetic oligonucleotide
uagcaccgcuuuuguucuc

SEQ ID NO: 2873 - RNA, 19 nt, Artificial Sequence
  Synthetic oligonucleotide
agcaccgcuuuuguucucg

SEQ ID NO: 2874 - RNA, 19 nt, Artificial Sequence
  Synthetic oligonucleotide
gcaccgcuuuuguucucgc

SEQ ID NO: 2875 - RNA, 19 nt, Artificial Sequence
  Synthetic oligonucleotide
caccgcuuuuguucucgca

SEQ ID NO: 2876 - RNA, 19 nt, Artificial Sequence
  Synthetic oligonucleotide
cgcuuuuguucucgcaaaa

SEQ ID NO: 2877 - RNA, 19 nt, Artificial Sequence
  Synthetic oligonucleotide
gcuuuuguucucgcaaaaa

SEQ ID NO: 2878 - RNA, 19 nt, Artificial Sequence
  Synthetic oligonucleotide
cuuuuguucucgcaaaaac

SEQ ID NO: 2879 - RNA, 19 nt, Artificial Sequence
  Synthetic oligonucleotide
uuuuguucucgcaaaaacg

SEQ ID NO: 2880 - RNA, 19 nt, Artificial Sequence
  Synthetic oligonucleotide
uucucgcaaaaacguaucu

SEQ ID NO: 2881 - RNA, 19 nt, Artificial Sequence
  Synthetic oligonucleotide
aaauuaguuuguguuacuu

SEQ ID NO: 2882 - RNA, 19 nt, Artificial Sequence
  Synthetic oligonucleotide
uuauggaagauaguuuucu

SEQ ID NO: 2883 - RNA, 19 nt, Artificial Sequence
  Synthetic oligonucleotide
ucaaaagcuuuuuacucaa

SEQ ID NO: 2884 - RNA, 19 nt, Artificial Sequence
  Synthetic oligonucleotide
acuaggguuugaaauugau

SEQ ID NO: 2885 - RNA, 19 nt, Artificial Sequence
  Synthetic oligonucleotide
uaaaauaauuucucuacaa

SEQ ID NO: 2886 - RNA, 19 nt, Artificial Sequence
  Synthetic oligonucleotide
cagcaguccuuuguaaaca

SEQ ID NO: 2887 - RNA, 19 nt, Artificial Sequence
  Synthetic oligonucleotide
caauuuaucaaggaagaaa

SEQ ID NO: 2888 - RNA, 19 nt, Artificial Sequence
  Synthetic oligonucleotide
uacaaaauguuccuuuugc

SEQ ID NO: 2889 - RNA, 19 nt, Artificial Sequence
  Synthetic oligonucleotide
guuccuuuugcuuuuaaag

SEQ ID NO: 2890 - RNA, 19 nt, Artificial Sequence
  Synthetic oligonucleotide
uuccuuuugcuuuuaaagu

SEQ ID NO: 2891 - RNA, 19 nt, Artificial Sequence
  Synthetic oligonucleotide
uugcuuuuaaaguaauuuu

SEQ ID NO: 2892 - RNA, 19 nt, Artificial Sequence
  Synthetic oligonucleotide
guuaagaaaguauuugauu

SEQ ID NO: 2893 - RNA, 19 nt, Artificial Sequence
  Synthetic oligonucleotide
uuggaaauuaccuaugugc

SEQ ID NO: 2894 - RNA, 19 nt, Artificial Sequence
  Synthetic oligonucleotide
uggaaauuaccuaugugca

SEQ ID NO: 2895 - RNA, 19 nt, Artificial Sequence
  Synthetic oligonucleotide
cuuuccuucuuaaagacca

SEQ ID NO: 2896 - RNA, 19 nt, Artificial Sequence
  Synthetic oligonucleotide
uuuccuucuuaaagaccau

SEQ ID NO: 2897 - RNA, 19 nt, Artificial Sequence
  Synthetic oligonucleotide
uuccuucuuaaagaccauc

SEQ ID NO: 2898 - RNA, 19 nt, Artificial Sequence
  Synthetic oligonucleotide
uccuucuuaaagaccaucc

SEQ ID NO: 2899 - RNA, 19 nt, Artificial Sequence
  Synthetic oligonucleotide
ccuucuuaaagaccaucca

SEQ ID NO: 2900 - RNA, 19 nt, Artificial Sequence
  Synthetic oligonucleotide
cuucuuaaagaccauccag

SEQ ID NO: 2901 - RNA, 19 nt, Artificial Sequence
  Synthetic oligonucleotide
uucuuaaagaccauccagg

SEQ ID NO: 2902 - RNA, 19 nt, Artificial Sequence
  Synthetic oligonucleotide
ucuuaaagaccauccagga

SEQ ID NO: 2903 - RNA, 19 nt, Artificial Sequence
  Synthetic oligonucleotide
cuuaaagaccauccaggag

SEQ ID NO: 2904 - RNA, 19 nt, Artificial Sequence
  Synthetic oligonucleotide
uuaaagaccauccaggagg

SEQ ID NO: 2905 - RNA, 19 nt, Artificial Sequence
  Synthetic oligonucleotide
uaaagaccauccaggaggu

SEQ ID NO: 2906 - RNA, 19 nt, Artificial Sequence
  Synthetic oligonucleotide
aaagaccauccaggaggug

SEQ ID NO: 2907 - RNA, 19 nt, Artificial Sequence
  Synthetic oligonucleotide
aagaccauccaggaggugg

SEQ ID NO: 2908 - RNA, 19 nt, Artificial Sequence
  Synthetic oligonucleotide
agaccauccaggagguggc

SEQ ID NO: 2909 - RNA, 19 nt, Artificial Sequence
  Synthetic oligonucleotide
ugugauccaagcuguccca

SEQ ID NO: 2910 - RNA, 19 nt, Artificial Sequence
  Synthetic oligonucleotide
gugauccaagcugucccaa

SEQ ID NO: 2911 - RNA, 19 nt, Artificial Sequence
  Synthetic oligonucleotide
ugauccaagcugucccaau

SEQ ID NO: 2912 - RNA, 19 nt, Artificial Sequence
  Synthetic oligonucleotide
gauccaagcugucccaaug

SEQ ID NO: 2913 - RNA, 19 nt, Artificial Sequence
  Synthetic oligonucleotide
auccaagcugucccaaugg

SEQ ID NO: 2914 - RNA, 19 nt, Artificial Sequence
  Synthetic oligonucleotide
aggagaggagaacugccag

SEQ ID NO: 2915 - RNA, 19 nt, Artificial Sequence
  Synthetic oligonucleotide
ggagaggagaacugccaga

SEQ ID NO: 2916 - RNA, 19 nt, Artificial Sequence
  Synthetic oligonucleotide
gagaggagaacugccagaa

SEQ ID NO: 2917 - RNA, 19 nt, Artificial Sequence
  Synthetic oligonucleotide
agaggagaacugccagaaa

SEQ ID NO: 2918 - RNA, 19 nt, Artificial Sequence
  Synthetic oligonucleotide
ugaccaaaaucaucugugc

SEQ ID NO: 2919 - RNA, 19 nt, Artificial Sequence
  Synthetic oligonucleotide
gaccaaaaucaucugugcc

SEQ ID NO: 2920 - RNA, 19 nt, Artificial Sequence
  Synthetic oligonucleotide
accaaaaucaucugugccc

SEQ ID NO: 2921 - RNA, 19 nt, Artificial Sequence
  Synthetic oligonucleotide
ccaaaaucaucugugccca

SEQ ID NO: 2922 - RNA, 19 nt, Artificial Sequence
  Synthetic oligonucleotide
caaaaucaucugugcccag

SEQ ID NO: 2923 - RNA, 19 nt, Artificial Sequence
  Synthetic oligonucleotide
aaaaucaucugugcccagc

SEQ ID NO: 2924 - RNA, 19 nt, Artificial Sequence
  Synthetic oligonucleotide
aaaucaucugugcccagca

SEQ ID NO: 2925 - RNA, 19 nt, Artificial Sequence
  Synthetic oligonucleotide
cagugacugcugccacaac

SEQ ID NO: 2926 - RNA, 19 nt, Artificial Sequence
  Synthetic oligonucleotide
agugacugcugccacaacc

SEQ ID NO: 2927 - RNA, 19 nt, Artificial Sequence
  Synthetic oligonucleotide
gugacugcugccacaacca

SEQ ID NO: 2928 - RNA, 19 nt, Artificial Sequence
  Synthetic oligonucleotide
cacucuccauaaaugcuac

SEQ ID NO: 2929 - RNA, 19 nt, Artificial Sequence
  Synthetic oligonucleotide
uuuuugcugauucaggcuu

SEQ ID NO: 2930 - RNA, 19 nt, Artificial Sequence
  Synthetic oligonucleotide
uuuugcugauucaggcuug

SEQ ID NO: 2931 - RNA, 19 nt, Artificial Sequence
  Synthetic oligonucleotide
uuugcugauucaggcuugg

SEQ ID NO: 2932 - RNA, 19 nt, Artificial Sequence
  Synthetic oligonucleotide
uugcugauucaggcuuggc

SEQ ID NO: 2933 - RNA, 19 nt, Artificial Sequence
  Synthetic oligonucleotide
ugcugauucaggcuuggcc

SEQ ID NO: 2934 - RNA, 19 nt, Artificial Sequence
  Synthetic oligonucleotide
gcugauucaggcuuggccu

SEQ ID NO: 2935 - RNA, 19 nt, Artificial Sequence
  Synthetic oligonucleotide
cugauucaggcuuggccug

SEQ ID NO: 2936 - RNA, 19 nt, Artificial Sequence
  Synthetic oligonucleotide
ugauucaggcuuggccuga

SEQ ID NO: 2937 - RNA, 19 nt, Artificial Sequence
  Synthetic oligonucleotide
aagcaacauggucaguuuu

SEQ ID NO: 2938 - RNA, 19 nt, Artificial Sequence
  Synthetic oligonucleotide
agcaacauggucaguuuuc

SEQ ID NO: 2939 - RNA, 19 nt, Artificial Sequence
  Synthetic oligonucleotide
gcaacauggucaguuuucu

SEQ ID NO: 2940 - RNA, 19 nt, Artificial Sequence
  Synthetic oligonucleotide
caauaaacuggaaaaaacu

SEQ ID NO: 2941 - RNA, 19 nt, Artificial Sequence
  Synthetic oligonucleotide
caggccaugaacaucaccu

SEQ ID NO: 2942 - RNA, 19 nt, Artificial Sequence
  Synthetic oligonucleotide
aggccaugaacaucaccug

SEQ ID NO: 2943 - RNA, 19 nt, Artificial Sequence
  Synthetic oligonucleotide
auccagugugcccacuaca

SEQ ID NO: 2944 - RNA, 19 nt, Artificial Sequence
  Synthetic oligonucleotide
uccagugugcccacuacau

SEQ ID NO: 2945 - RNA, 19 nt, Artificial Sequence
  Synthetic oligonucleotide
ccagugugcccacuacauu

SEQ ID NO: 2946 - RNA, 19 nt, Artificial Sequence
  Synthetic oligonucleotide
cagugugcccacuacauug

SEQ ID NO: 2947 - RNA, 19 nt, Artificial Sequence
  Synthetic oligonucleotide
agugugcccacuacauuga

SEQ ID NO: 2948 - RNA, 19 nt, Artificial Sequence
  Synthetic oligonucleotide
gaauucaaaaagaucaaag

SEQ ID NO: 2949 - RNA, 19 nt, Artificial Sequence
  Synthetic oligonucleotide
aauucaaaaagaucaaagu

SEQ ID NO: 2950 - RNA, 19 nt, Artificial Sequence
  Synthetic oligonucleotide
cucuggaucccagaaggug

SEQ ID NO: 2951 - RNA, 19 nt, Artificial Sequence
  Synthetic oligonucleotide
ucuggaucccagaagguga

SEQ ID NO: 2952 - RNA, 19 nt, Artificial Sequence
  Synthetic oligonucleotide
cuggaucccagaaggugag

SEQ ID NO: 2953 - RNA, 19 nt, Artificial Sequence
  Synthetic oligonucleotide
uggaucccagaaggugaga

SEQ ID NO: 2954 - RNA, 19 nt, Artificial Sequence
  Synthetic oligonucleotide
ggaucccagaaggugagaa

SEQ ID NO: 2955 - RNA, 19 nt, Artificial Sequence
  Synthetic oligonucleotide
gaucccagaaggugagaaa

SEQ ID NO: 2956 - RNA, 19 nt, Artificial Sequence
  Synthetic oligonucleotide
aucccagaaggugagaaag

SEQ ID NO: 2957 - RNA, 19 nt, Artificial Sequence
  Synthetic oligonucleotide
ucccagaaggugagaaagu

SEQ ID NO: 2958 - RNA, 19 nt, Artificial Sequence
  Synthetic oligonucleotide
cagcaugucaagaucacag

SEQ ID NO: 2959 - RNA, 19 nt, Artificial Sequence
  Synthetic oligonucleotide
agcaugucaagaucacaga

SEQ ID NO: 2960 - RNA, 19 nt, Artificial Sequence
  Synthetic oligonucleotide
gcaugucaagaucacagau

SEQ ID NO: 2961 - RNA, 19 nt, Artificial Sequence
  Synthetic oligonucleotide
caugucaagaucacagauu

SEQ ID NO: 2962 - RNA, 19 nt, Artificial Sequence
  Synthetic oligonucleotide
augucaagaucacagauuu

SEQ ID NO: 2963 - RNA, 19 nt, Artificial Sequence
  Synthetic oligonucleotide
ugucaagaucacagauuuu

SEQ ID NO: 2964 - RNA, 19 nt, Artificial Sequence
  Synthetic oligonucleotide
gucaagaucacagauuuug

SEQ ID NO: 2965 - RNA, 19 nt, Artificial Sequence
  Synthetic oligonucleotide
ucaagaucacagauuuugg

SEQ ID NO: 2966 - RNA, 19 nt, Artificial Sequence
  Synthetic oligonucleotide
caagaucacagauuuuggg

SEQ ID NO: 2967 - RNA, 19 nt, Artificial Sequence
  Synthetic oligonucleotide
aagaucacagauuuugggc

SEQ ID NO: 2968 - RNA, 19 nt, Artificial Sequence
  Synthetic oligonucleotide
agaucacagauuuugggcu

SEQ ID NO: 2969 - RNA, 19 nt, Artificial Sequence
  Synthetic oligonucleotide
gaucacagauuuugggcug

SEQ ID NO: 2970 - RNA, 19 nt, Artificial Sequence
  Synthetic oligonucleotide
aucacagauuuugggcugg

SEQ ID NO: 2971 - RNA, 19 nt, Artificial Sequence
  Synthetic oligonucleotide
ucacagauuuugggcuggc

SEQ ID NO: 2972 - RNA, 19 nt, Artificial Sequence
  Synthetic oligonucleotide
cacagauuuugggcuggcc

SEQ ID NO: 2973 - RNA, 19 nt, Artificial Sequence
  Synthetic oligonucleotide
acagauuuugggcuggcca

SEQ ID NO: 2974 - RNA, 19 nt, Artificial Sequence
  Synthetic oligonucleotide
cagauuuugggcuggccaa

SEQ ID NO: 2975 - RNA, 19 nt, Artificial Sequence
  Synthetic oligonucleotide
agauuuugggcuggccaaa

SEQ ID NO: 2976 - RNA, 19 nt, Artificial Sequence
  Synthetic oligonucleotide
gauuuugggcuggccaaac

SEQ ID NO: 2977 - RNA, 19 nt, Artificial Sequence
  Synthetic oligonucleotide
auuuugggcuggccaaacu

SEQ ID NO: 2978 - RNA, 19 nt, Artificial Sequence
  Synthetic oligonucleotide
uuuugggcuggccaaacug

SEQ ID NO: 2979 - RNA, 19 nt, Artificial Sequence
  Synthetic oligonucleotide
uuugggcuggccaaacugc

SEQ ID NO: 2980 - RNA, 19 nt, Artificial Sequence
  Synthetic oligonucleotide
uugggcuggccaaacugcu

SEQ ID NO: 2981 - RNA, 19 nt, Artificial Sequence
  Synthetic oligonucleotide
gcaaagugccuaucaagug

SEQ ID NO: 2982 - RNA, 19 nt, Artificial Sequence
  Synthetic oligonucleotide
caaagugccuaucaagugg

SEQ ID NO: 2983 - RNA, 19 nt, Artificial Sequence
  Synthetic oligonucleotide
aaagugccuaucaagugga

SEQ ID NO: 2984 - RNA, 19 nt, Artificial Sequence
  Synthetic oligonucleotide
aagugccuaucaaguggau

SEQ ID NO: 2985 - RNA, 19 nt, Artificial Sequence
  Synthetic oligonucleotide
agugccuaucaaguggaug

SEQ ID NO: 2986 - RNA, 19 nt, Artificial Sequence
  Synthetic oligonucleotide
gugccuaucaaguggaugg

SEQ ID NO: 2987 - RNA, 19 nt, Artificial Sequence
  Synthetic oligonucleotide
ugccuaucaaguggauggc

SEQ ID NO: 2988 - RNA, 19 nt, Artificial Sequence
  Synthetic oligonucleotide
accaucgaugucuacauga

SEQ ID NO: 2989 - RNA, 19 nt, Artificial Sequence
  Synthetic oligonucleotide
ccaucgaugucuacaugau

SEQ ID NO: 2990 - RNA, 19 nt, Artificial Sequence
  Synthetic oligonucleotide
caucgaugucuacaugauc

SEQ ID NO: 2991 - RNA, 19 nt, Artificial Sequence
  Synthetic oligonucleotide
aucgaugucuacaugauca

SEQ ID NO: 2992 - RNA, 19 nt, Artificial Sequence
  Synthetic oligonucleotide
ucgaugucuacaugaucau

SEQ ID NO: 2993 - RNA, 19 nt, Artificial Sequence
  Synthetic oligonucleotide
cgaugucuacaugaucaug

SEQ ID NO: 2994 - RNA, 19 nt, Artificial Sequence
  Synthetic oligonucleotide
gaugucuacaugaucaugg

SEQ ID NO: 2995 - RNA, 19 nt, Artificial Sequence
  Synthetic oligonucleotide
augucuacaugaucauggu

SEQ ID NO: 2996 - RNA, 19 nt, Artificial Sequence
  Synthetic oligonucleotide
ugucuacaugaucaugguc

SEQ ID NO: 2997 - RNA, 19 nt, Artificial Sequence
  Synthetic oligonucleotide
gucuacaugaucaugguca

SEQ ID NO: 2998 - RNA, 19 nt, Artificial Sequence
  Synthetic oligonucleotide
ucuacaugaucauggucaa

SEQ ID NO: 2999 - RNA, 19 nt, Artificial Sequence
  Synthetic oligonucleotide
cuacaugaucauggucaag

SEQ ID NO: 3000 - RNA, 19 nt, Artificial Sequence
  Synthetic oligonucleotide
uacaugaucauggucaagu

SEQ ID NO: 3001 - RNA, 19 nt, Artificial Sequence
  Synthetic oligonucleotide
acaugaucauggucaagug

SEQ ID NO: 3002 - RNA, 19 nt, Artificial Sequence
  Synthetic oligonucleotide
caugaucauggucaagugc

SEQ ID NO: 3003 - RNA, 19 nt, Artificial Sequence
  Synthetic oligonucleotide
augaucauggucaagugcu

SEQ ID NO: 3004 - RNA, 19 nt, Artificial Sequence
  Synthetic oligonucleotide
ugaucauggucaagugcug

SEQ ID NO: 3005 - RNA, 19 nt, Artificial Sequence
  Synthetic oligonucleotide
gaucauggucaagugcugg

SEQ ID NO: 3006 - RNA, 19 nt, Artificial Sequence
  Synthetic oligonucleotide
aucauggucaagugcugga

SEQ ID NO: 3007 - RNA, 19 nt, Artificial Sequence
  Synthetic oligonucleotide
ucauggucaagugcuggau

SEQ ID NO: 3008 - RNA, 19 nt, Artificial Sequence
  Synthetic oligonucleotide
cauggucaagugcuggaug

SEQ ID NO: 3009 - RNA, 19 nt, Artificial Sequence
  Synthetic oligonucleotide
auggucaagugcuggauga

SEQ ID NO: 3010 - RNA, 19 nt, Artificial Sequence
  Synthetic oligonucleotide
uggucaagugcuggaugau

SEQ ID NO: 3011 - RNA, 19 nt, Artificial Sequence
  Synthetic oligonucleotide
ggucaagugcuggaugaua

SEQ ID NO: 3012 - RNA, 19 nt, Artificial Sequence
  Synthetic oligonucleotide
gucaagugcuggaugauag

SEQ ID NO: 3013 - RNA, 19 nt, Artificial Sequence
  Synthetic oligonucleotide
ucaagugcuggaugauaga

SEQ ID NO: 3014 - RNA, 19 nt, Artificial Sequence
  Synthetic oligonucleotide
gaauucuccaaaauggccc

SEQ ID NO: 3015 - RNA, 19 nt, Artificial Sequence
  Synthetic oligonucleotide
aauucuccaaaauggcccg

SEQ ID NO: 3016 - RNA, 19 nt, Artificial Sequence
  Synthetic oligonucleotide
gaugaaagaaugcauuugc

SEQ ID NO: 3017 - RNA, 19 nt, Artificial Sequence
  Synthetic oligonucleotide
augaaagaaugcauuugcc

SEQ ID NO: 3018 - RNA, 19 nt, Artificial Sequence
  Synthetic oligonucleotide
ugaaagaaugcauuugcca

SEQ ID NO: 3019 - RNA, 19 nt, Artificial Sequence
  Synthetic oligonucleotide
gaaagaaugcauuugccaa

SEQ ID NO: 3020 - RNA, 19 nt, Artificial Sequence
  Synthetic oligonucleotide
aaagaaugcauuugccaag

SEQ ID NO: 3021 - RNA, 19 nt, Artificial Sequence
  Synthetic oligonucleotide
gacaacccugacuaccagc

SEQ ID NO: 3022 - RNA, 19 nt, Artificial Sequence
  Synthetic oligonucleotide
acaacccugacuaccagca

SEQ ID NO: 3023 - RNA, 19 nt, Artificial Sequence
  Synthetic oligonucleotide
caacccugacuaccagcag

SEQ ID NO: 3024 - RNA, 19 nt, Artificial Sequence
  Synthetic oligonucleotide
aacccugacuaccagcagg

SEQ ID NO: 3025 - RNA, 19 nt, Artificial Sequence
  Synthetic oligonucleotide
acccugacuaccagcagga

SEQ ID NO: 3026 - RNA, 19 nt, Artificial Sequence
  Synthetic oligonucleotide
cccugacuaccagcaggac

SEQ ID NO: 3027 - RNA, 19 nt, Artificial Sequence
  Synthetic oligonucleotide
ccugacuaccagcaggacu

SEQ ID NO: 3028 - RNA, 19 nt, Artificial Sequence
  Synthetic oligonucleotide
cugacuaccagcaggacuu

SEQ ID NO: 3029 - RNA, 19 nt, Artificial Sequence
  Synthetic oligonucleotide
gcgcagcgcggccgcagca

SEQ ID NO: 3030 - RNA, 19 nt, Artificial Sequence
  Synthetic oligonucleotide
cgcagcgcggccgcagcag

SEQ ID NO: 3031 - RNA, 19 nt, Artificial Sequence
  Synthetic oligonucleotide
cagcgcggccgcagcagcc

SEQ ID NO: 3032 - RNA, 19 nt, Artificial Sequence
  Synthetic oligonucleotide
agcgcuccuggcgcugcug

SEQ ID NO: 3033 - RNA, 19 nt, Artificial Sequence
  Synthetic oligonucleotide
cgcuccuggcgcugcuggc

SEQ ID NO: 3034 - RNA, 19 nt, Artificial Sequence
  Synthetic oligonucleotide
cuccuggcgcugcuggcug

SEQ ID NO: 3035 - RNA, 19 nt, Artificial Sequence
  Synthetic oligonucleotide
aguugggcacuuuugaaga

SEQ ID NO: 3036 - RNA, 19 nt, Artificial Sequence
  Synthetic oligonucleotide
gggaauuuggaaauuaccu

SEQ ID NO: 3037 - RNA, 19 nt, Artificial Sequence
  Synthetic oligonucleotide
auuaugaucuuuccuucuu

SEQ ID NO: 3038 - RNA, 19 nt, Artificial Sequence
  Synthetic oligonucleotide
uggcugguuauguccucau

SEQ ID NO: 3039 - RNA, 19 nt, Artificial Sequence
  Synthetic oligonucleotide
gcccaugagaaauuuacag

SEQ ID NO: 3040 - RNA, 19 nt, Artificial Sequence
  Synthetic oligonucleotide
cugcauggcgccgugcggu

SEQ ID NO: 3041 - RNA, 19 nt, Artificial Sequence
  Synthetic oligonucleotide
ggcgccgugcgguucagca

SEQ ID NO: 3042 - RNA, 19 nt, Artificial Sequence
  Synthetic oligonucleotide
ggcgccgugcgguucagca

SEQ ID NO: 3043 - RNA, 19 nt, Artificial Sequence
  Synthetic oligonucleotide
cgccgugcgguucagcaac

SEQ ID NO: 3044 - RNA, 19 nt, Artificial Sequence
  Synthetic oligonucleotide
gccgugcgguucagcaaca

SEQ ID NO: 3045 - RNA, 19 nt, Artificial Sequence
  Synthetic oligonucleotide
agcugccaaaagugugauc

SEQ ID NO: 3046 - RNA, 19 nt, Artificial Sequence
  Synthetic oligonucleotide
ucugugcccagcagugcuc

SEQ ID NO: 3047 - RNA, 19 nt, Artificial Sequence
  Synthetic oligonucleotide
ugugcccagcagugcuccg

SEQ ID NO: 3048 - RNA, 19 nt, Artificial Sequence
  Synthetic oligonucleotide
ugcuccgggcgcugccgug

SEQ ID NO: 3049 - RNA, 19 nt, Artificial Sequence
  Synthetic oligonucleotide
agagcgacugccuggucug

SEQ ID NO: 3050 - RNA, 19 nt, Artificial Sequence
  Synthetic oligonucleotide
ugccuggucugccgcaaau

SEQ ID NO: 3051 - RNA, 19 nt, Artificial Sequence
  Synthetic oligonucleotide
acagaucacggcucgugcg

SEQ ID NO: 3052 - RNA, 19 nt, Artificial Sequence
  Synthetic oligonucleotide
cgcaaaguguguaacggaa

SEQ ID NO: 3053 - RNA, 19 nt, Artificial Sequence
  Synthetic oligonucleotide
ggaauagguauuggugaau

SEQ ID NO: 3054 - RNA, 19 nt, Artificial Sequence
  Synthetic oligonucleotide
uacgaauauuaaacacuuc

SEQ ID NO: 3055 - RNA, 19 nt, Artificial Sequence
  Synthetic oligonucleotide
cacaggaacuggauauucu

SEQ ID NO: 3056 - RNA, 19 nt, Artificial Sequence
  Synthetic oligonucleotide
acaggguuuuugcugauuc

SEQ ID NO: 3057 - RNA, 19 nt, Artificial Sequence
  Synthetic oligonucleotide
ucaggaaacaaaaauuugu

SEQ ID NO: 3058 - RNA, 19 nt, Artificial Sequence
  Synthetic oligonucleotide
ugcuaugcaaauacaauaa

SEQ ID NO: 3059 - RNA, 19 nt, Artificial Sequence
  Synthetic oligonucleotide
cggucagaaaaccaaaauu

SEQ ID NO: 3060 - RNA, 19 nt, Artificial Sequence
  Synthetic oligonucleotide
ugcgucucuugccggaaug

SEQ ID NO: 3061 - RNA, 19 nt, Artificial Sequence
  Synthetic oligonucleotide
ggcccuccucuugcugcug

SEQ ID NO: 3062 - RNA, 19 nt, Artificial Sequence
  Synthetic oligonucleotide
gcccuccucuugcugcugg

SEQ ID NO: 3063 - RNA, 19 nt, Artificial Sequence
  Synthetic oligonucleotide
uccucuugcugcugguggu

SEQ ID NO: 3064 - RNA, 19 nt, Artificial Sequence
  Synthetic oligonucleotide
ccucuugcugcugguggug

SEQ ID NO: 3065 - RNA, 19 nt, Artificial Sequence
  Synthetic oligonucleotide
ggaagcgcacgcugcggag

SEQ ID NO: 3066 - RNA, 19 nt, Artificial Sequence
  Synthetic oligonucleotide
agcgcacgcugcggaggcu

SEQ ID NO: 3067 - RNA, 19 nt, Artificial Sequence
  Synthetic oligonucleotide
acugaauucaaaaagauca

SEQ ID NO: 3068 - RNA, 19 nt, Artificial Sequence
  Synthetic oligonucleotide
aaagugcugggcuccggug

SEQ ID NO: 3069 - RNA, 19 nt, Artificial Sequence
  Synthetic oligonucleotide
agugcugggcuccggugcg

SEQ ID NO: 3070 - RNA, 19 nt, Artificial Sequence
  Synthetic oligonucleotide
gugcugggcuccggugcgu

SEQ ID NO: 3071 - RNA, 19 nt, Artificial Sequence
  Synthetic oligonucleotide
ugcugggcuccggugcguu

SEQ ID NO: 3072 - RNA, 19 nt, Artificial Sequence
  Synthetic oligonucleotide
gcugggcuccggugcguuc

SEQ ID NO: 3073 - RNA, 19 nt, Artificial Sequence
  Synthetic oligonucleotide
gugugccgccugcugggca

SEQ ID NO: 3074 - RNA, 19 nt, Artificial Sequence
  Synthetic oligonucleotide
ugugccgccugcugggcau

SEQ ID NO: 3075 - RNA, 19 nt, Artificial Sequence
  Synthetic oligonucleotide
ugccgccugcugggcaucu

SEQ ID NO: 3076 - RNA, 19 nt, Artificial Sequence
  Synthetic oligonucleotide
accgugcagcucaucacgc

SEQ ID NO: 3077 - RNA, 19 nt, Artificial Sequence
  Synthetic oligonucleotide
gugcagcucaucacgcagc

SEQ ID NO: 3078 - RNA, 19 nt, Artificial Sequence
  Synthetic oligonucleotide
agcucaucacgcagcucau

SEQ ID NO: 3079 - RNA, 19 nt, Artificial Sequence
  Synthetic oligonucleotide
gcucaucacgcagcucaug

SEQ ID NO: 3080 - RNA, 19 nt, Artificial Sequence
  Synthetic oligonucleotide
agcucaugcccuucggcug

SEQ ID NO: 3081 - RNA, 19 nt, Artificial Sequence
  Synthetic oligonucleotide
gcucaugcccuucggcugc

SEQ ID NO: 3082 - RNA, 19 nt, Artificial Sequence
  Synthetic oligonucleotide
uggaggaccgucgcuuggu

SEQ ID NO: 3083 - RNA, 19 nt, Artificial Sequence
  Synthetic oligonucleotide
gaggaccgucgcuuggugc

SEQ ID NO: 3084 - RNA, 19 nt, Artificial Sequence
  Synthetic oligonucleotide
aggaccgucgcuuggugca

SEQ ID NO: 3085 - RNA, 19 nt, Artificial Sequence
  Synthetic oligonucleotide
ggaccgucgcuuggugcac

SEQ ID NO: 3086 - RNA, 19 nt, Artificial Sequence
  Synthetic oligonucleotide
accgucgcuuggugcaccg

SEQ ID NO: 3087 - RNA, 19 nt, Artificial Sequence
  Synthetic oligonucleotide
cgucgcuuggugcaccgcg

SEQ ID NO: 3088 - RNA, 19 nt, Artificial Sequence
  Synthetic oligonucleotide
ucgcuuggugcaccgcgac

SEQ ID NO: 3089 - RNA, 19 nt, Artificial Sequence
  Synthetic oligonucleotide
cgcuuggugcaccgcgacc

SEQ ID NO: 3090 - RNA, 19 nt, Artificial Sequence
  Synthetic oligonucleotide
cuuggugcaccgcgaccug

SEQ ID NO: 3091 - RNA, 19 nt, Artificial Sequence
  Synthetic oligonucleotide
gcauuggaaucaauuuuac

SEQ ID NO: 3092 - RNA, 19 nt, Artificial Sequence
  Synthetic oligonucleotide
caagugcuggaugauagac

SEQ ID NO: 3093 - RNA, 19 nt, Artificial Sequence
  Synthetic oligonucleotide
agugcuggaugauagacgc

SEQ ID NO: 3094 - RNA, 19 nt, Artificial Sequence
  Synthetic oligonucleotide
gugcuggaugauagacgca

SEQ ID NO: 3095 - RNA, 19 nt, Artificial Sequence
  Synthetic oligonucleotide
gcuggaugauagacgcaga

SEQ ID NO: 3096 - RNA, 19 nt, Artificial Sequence
  Synthetic oligonucleotide
uccugagcucucugagugc

SEQ ID NO: 3097 - RNA, 19 nt, Artificial Sequence
  Synthetic oligonucleotide
ugagcucucugagugcaac

SEQ ID NO: 3098 - RNA, 19 nt, Artificial Sequence
  Synthetic oligonucleotide
agcugucccaucaaggaag

SEQ ID NO: 3099 - RNA, 19 nt, Artificial Sequence
  Synthetic oligonucleotide
gcugucccaucaaggaaga

SEQ ID NO: 3100 - RNA, 19 nt, Artificial Sequence
  Synthetic oligonucleotide
agacagcuucuugcagcga

SEQ ID NO: 3101 - RNA, 19 nt, Artificial Sequence
  Synthetic oligonucleotide
gacagcuucuugcagcgau

SEQ ID NO: 3102 - RNA, 19 nt, Artificial Sequence
  Synthetic oligonucleotide
acagcuucuugcagcgaua

SEQ ID NO: 3103 - RNA, 19 nt, Artificial Sequence
  Synthetic oligonucleotide
cagcuucuugcagcgauac

SEQ ID NO: 3104 - RNA, 19 nt, Artificial Sequence
  Synthetic oligonucleotide
agcuucuugcagcgauaca

SEQ ID NO: 3105 - RNA, 19 nt, Artificial Sequence
  Synthetic oligonucleotide
cuucuugcagcgauacagc

SEQ ID NO: 3106 - RNA, 19 nt, Artificial Sequence
  Synthetic oligonucleotide
cacaaagcagugaauuuau

SEQ ID NO: 3107 - RNA, 19 nt, Artificial Sequence
  Synthetic oligonucleotide
uauauuugaaaaaaaaaaa

SEQ ID NO: 3108 - RNA, 19 nt, Artificial Sequence
  Synthetic oligonucleotide
gugaggauuuuuauugauu

SEQ ID NO: 3109 - RNA, 19 nt, Artificial Sequence
  Synthetic oligonucleotide
gcuauugauuuuuacuuca

SEQ ID NO: 3110 - RNA, 19 nt, Artificial Sequence
  Synthetic oligonucleotide
aggaagaagcuugcuggua

SEQ ID NO: 3111 - RNA, 19 nt, Artificial Sequence
  Synthetic oligonucleotide
ggaagaagcuugcugguag

SEQ ID NO: 3112 - RNA, 19 nt, Artificial Sequence
  Synthetic oligonucleotide
gaagaagcuugcugguagc

SEQ ID NO: 3113 - RNA, 19 nt, Artificial Sequence
  Synthetic oligonucleotide
aagaagcuugcugguagca

SEQ ID NO: 3114 - RNA, 19 nt, Artificial Sequence
  Synthetic oligonucleotide
agaagcuugcugguagcac

SEQ ID NO: 3115 - RNA, 19 nt, Artificial Sequence
  Synthetic oligonucleotide
aagcuugcugguagcacuu

SEQ ID NO: 3116 - RNA, 19 nt, Artificial Sequence
  Synthetic oligonucleotide
agcuugcugguagcacuug

SEQ ID NO: 3117 - RNA, 19 nt, Artificial Sequence
  Synthetic oligonucleotide
gcuugcugguagcacuugc

SEQ ID NO: 3118 - RNA, 19 nt, Artificial Sequence
  Synthetic oligonucleotide
cuugcugguagcacuugcu

SEQ ID NO: 3119 - RNA, 19 nt, Artificial Sequence
  Synthetic oligonucleotide
uugcugguagcacuugcua

SEQ ID NO: 3120 - RNA, 19 nt, Artificial Sequence
  Synthetic oligonucleotide
ugcugguagcacuugcuac

SEQ ID NO: 3121 - RNA, 19 nt, Artificial Sequence
  Synthetic oligonucleotide
gaugcuugauuccaguggu

SEQ ID NO: 3122 - RNA, 19 nt, Artificial Sequence
  Synthetic oligonucleotide
augcuugauuccagugguu

SEQ ID NO: 3123 - RNA, 19 nt, Artificial Sequence
  Synthetic oligonucleotide
gcaggccggaucgguacug

SEQ ID NO: 3124 - RNA, 19 nt, Artificial Sequence
  Synthetic oligonucleotide
ccggaucgguacuguauca

SEQ ID NO: 3125 - RNA, 19 nt, Artificial Sequence
  Synthetic oligonucleotide
ccuuagacuuacuuuugua

SEQ ID NO: 3126 - RNA, 19 nt, Artificial Sequence
  Synthetic oligonucleotide
ugucuugcugucaugaaau

SEQ ID NO: 3127 - RNA, 19 nt, Artificial Sequence
  Synthetic oligonucleotide
cuaaggauagcaccgcuuu

SEQ ID NO: 3128 - RNA, 19 nt, Artificial Sequence
  Synthetic oligonucleotide
aaggauagcaccgcuuuug

SEQ ID NO: 3129 - RNA, 19 nt, Artificial Sequence
  Synthetic oligonucleotide
aggauagcaccgcuuuugu

SEQ ID NO: 3130 - RNA, 19 nt, Artificial Sequence
  Synthetic oligonucleotide
ggauagcaccgcuuuuguu

SEQ ID NO: 3131 - RNA, 19 nt, Artificial Sequence
  Synthetic oligonucleotide
gauagcaccgcuuuuguuc

SEQ ID NO: 3132 - RNA, 19 nt, Artificial Sequence
  Synthetic oligonucleotide
auagcaccgcuuuuguucu

SEQ ID NO: 3133 - RNA, 19 nt, Artificial Sequence
  Synthetic oligonucleotide
uagcaccgcuuuuguucuc

SEQ ID NO: 3134 - RNA, 19 nt, Artificial Sequence
  Synthetic oligonucleotide
agcaccgcuuuuguucucg

SEQ ID NO: 3135 - RNA, 19 nt, Artificial Sequence
  Synthetic oligonucleotide
gcaccgcuuuuguucucgc

SEQ ID NO: 3136 - RNA, 19 nt, Artificial Sequence
  Synthetic oligonucleotide
ccgcuuuuguucucgcaaa

SEQ ID NO: 3137 - RNA, 19 nt, Artificial Sequence
  Synthetic oligonucleotide
cgcuuuuguucucgcaaaa

SEQ ID NO: 3138 - RNA, 19 nt, Artificial Sequence
  Synthetic oligonucleotide
gcuuuuguucucgcaaaaa

SEQ ID NO: 3139 - RNA, 19 nt, Artificial Sequence
  Synthetic oligonucleotide
cuuuuguucucgcaaaaac

SEQ ID NO: 3140 - RNA, 19 nt, Artificial Sequence
  Synthetic oligonucleotide
guucucgcaaaaacguauc

SEQ ID NO: 3141 - RNA, 19 nt, Artificial Sequence
  Synthetic oligonucleotide
aaaauuaguuuguguuacu

SEQ ID NO: 3142 - RNA, 19 nt, Artificial Sequence
  Synthetic oligonucleotide
cuuauggaagauaguuuuc

SEQ ID NO: 3143 - RNA, 19 nt, Artificial Sequence
  Synthetic oligonucleotide
uucaaaagcuuuuuacuca

SEQ ID NO: 3144 - RNA, 19 nt, Artificial Sequence
  Synthetic oligonucleotide
aacuaggguuugaaauuga

SEQ ID NO: 3145 - RNA, 19 nt, Artificial Sequence
  Synthetic oligonucleotide
cuaaaauaauuucucuaca

SEQ ID NO: 3146 - RNA, 19 nt, Artificial Sequence
  Synthetic oligonucleotide
acagcaguccuuuguaaac

SEQ ID NO: 3147 - RNA, 19 nt, Artificial Sequence
  Synthetic oligonucleotide
ccaauuuaucaaggaagaa

SEQ ID NO: 3148 - RNA, 19 nt, Artificial Sequence
  Synthetic oligonucleotide
auacaaaauguuccuuuug

SEQ ID NO: 3149 - RNA, 19 nt, Artificial Sequence
  Synthetic oligonucleotide
uguuccuuuugcuuuuaaa

SEQ ID NO: 3150 - RNA, 19 nt, Artificial Sequence
  Synthetic oligonucleotide
guuccuuuugcuuuuaaag

SEQ ID NO: 3151 - RNA, 19 nt, Artificial Sequence
  Synthetic oligonucleotide
uuugcuuuuaaaguaauuu

SEQ ID NO: 3152 - RNA, 19 nt, Artificial Sequence
  Synthetic oligonucleotide
uguuaagaaaguauuugau

SEQ ID NO: 3153 - RNA, 19 nt, Artificial Sequence
  Synthetic oligonucleotide
uuuggaaauuaccuaugug

SEQ ID NO: 3154 - RNA, 19 nt, Artificial Sequence
  Synthetic oligonucleotide
uuggaaauuaccuaugugc

SEQ ID NO: 3155 - RNA, 19 nt, Artificial Sequence
  Synthetic oligonucleotide
ucuuuccuucuuaaagacc

SEQ ID NO: 3156 - RNA, 19 nt, Artificial Sequence
  Synthetic oligonucleotide
cuuuccuucuuaaagacca

SEQ ID NO: 3157 - RNA, 19 nt, Artificial Sequence
  Synthetic oligonucleotide
uuuccuucuuaaagaccau

SEQ ID NO: 3158 - RNA, 19 nt, Artificial Sequence
  Synthetic oligonucleotide
uuccuucuuaaagaccauc

SEQ ID NO: 3159 - RNA, 19 nt, Artificial Sequence
  Synthetic oligonucleotide
uccuucuuaaagaccaucc

SEQ ID NO: 3160 - RNA, 19 nt, Artificial Sequence
  Synthetic oligonucleotide
ccuucuuaaagaccaucca

SEQ ID NO: 3161 - RNA, 19 nt, Artificial Sequence
  Synthetic oligonucleotide
cuucuuaaagaccauccag

SEQ ID NO: 3162 - RNA, 19 nt, Artificial Sequence
  Synthetic oligonucleotide
uucuuaaagaccauccagg

SEQ ID NO: 3163 - RNA, 19 nt, Artificial Sequence
  Synthetic oligonucleotide
ucuuaaagaccauccagga

SEQ ID NO: 3164 - RNA, 19 nt, Artificial Sequence
  Synthetic oligonucleotide
cuuaaagaccauccaggag

SEQ ID NO: 3165 - RNA, 19 nt, Artificial Sequence
  Synthetic oligonucleotide
uuaaagaccauccaggagg

SEQ ID NO: 3166 - RNA, 19 nt, Artificial Sequence
  Synthetic oligonucleotide
uaaagaccauccaggaggu

SEQ ID NO: 3167 - RNA, 19 nt, Artificial Sequence
  Synthetic oligonucleotide
aaagaccauccaggaggug

SEQ ID NO: 3168 - RNA, 19 nt, Artificial Sequence
  Synthetic oligonucleotide
aagaccauccaggaggugg

SEQ ID NO: 3169 - RNA, 19 nt, Artificial Sequence
  Synthetic oligonucleotide
gugugauccaagcuguccc

SEQ ID NO: 3170 - RNA, 19 nt, Artificial Sequence
  Synthetic oligonucleotide
ugugauccaagcuguccca

SEQ ID NO: 3171 - RNA, 19 nt, Artificial Sequence
  Synthetic oligonucleotide
gugauccaagcugucccaa

SEQ ID NO: 3172 - RNA, 19 nt, Artificial Sequence
  Synthetic oligonucleotide
ugauccaagcugucccaau

SEQ ID NO: 3173 - RNA, 19 nt, Artificial Sequence
  Synthetic oligonucleotide
gauccaagcugucccaaug

SEQ ID NO: 3174 - RNA, 19 nt, Artificial Sequence
  Synthetic oligonucleotide
caggagaggagaacugcca

SEQ ID NO: 3175 - RNA, 19 nt, Artificial Sequence
  Synthetic oligonucleotide
aggagaggagaacugccag

SEQ ID NO: 3176 - RNA, 19 nt, Artificial Sequence
  Synthetic oligonucleotide
ggagaggagaacugccaga

SEQ ID NO: 3177 - RNA, 19 nt, Artificial Sequence
  Synthetic oligonucleotide
gagaggagaacugccagaa

SEQ ID NO: 3178 - RNA, 19 nt, Artificial Sequence
  Synthetic oligonucleotide
cugaccaaaaucaucugug

SEQ ID NO: 3179 - RNA, 19 nt, Artificial Sequence
  Synthetic oligonucleotide
ugaccaaaaucaucugugc

SEQ ID NO: 3180 - RNA, 19 nt, Artificial Sequence
  Synthetic oligonucleotide
gaccaaaaucaucugugcc

SEQ ID NO: 3181 - RNA, 19 nt, Artificial Sequence
  Synthetic oligonucleotide
accaaaaucaucugugccc

SEQ ID NO: 3182 - RNA, 19 nt, Artificial Sequence
  Synthetic oligonucleotide
ccaaaaucaucugugccca

SEQ ID NO: 3183 - RNA, 19 nt, Artificial Sequence
  Synthetic oligonucleotide
caaaaucaucugugcccag

SEQ ID NO: 3184 - RNA, 19 nt, Artificial Sequence
  Synthetic oligonucleotide
aaaaucaucugugcccagc

SEQ ID NO: 3185 - RNA, 19 nt, Artificial Sequence
  Synthetic oligonucleotide
ccagugacugcugccacaa

SEQ ID NO: 3186 - RNA, 19 nt, Artificial Sequence
  Synthetic oligonucleotide
cagugacugcugccacaac

SEQ ID NO: 3187 - RNA, 19 nt, Artificial Sequence
  Synthetic oligonucleotide
agugacugcugccacaacc

SEQ ID NO: 3188 - RNA, 19 nt, Artificial Sequence
  Synthetic oligonucleotide
ucacucuccauaaaugcua

SEQ ID NO: 3189 - RNA, 19 nt, Artificial Sequence
  Synthetic oligonucleotide
guuuuugcugauucaggcu

SEQ ID NO: 3190 - RNA, 19 nt, Artificial Sequence
  Synthetic oligonucleotide
uuuuugcugauucaggcuu

SEQ ID NO: 3191 - RNA, 19 nt, Artificial Sequence
  Synthetic oligonucleotide
uuuugcugauucaggcuug

SEQ ID NO: 3192 - RNA, 19 nt, Artificial Sequence
  Synthetic oligonucleotide
uuugcugauucaggcuugg

SEQ ID NO: 3193 - RNA, 19 nt, Artificial Sequence
  Synthetic oligonucleotide
uugcugauucaggcuuggc

SEQ ID NO: 3194 - RNA, 19 nt, Artificial Sequence
  Synthetic oligonucleotide
ugcugauucaggcuuggcc

SEQ ID NO: 3195 - RNA, 19 nt, Artificial Sequence
  Synthetic oligonucleotide
gcugauucaggcuuggccu

SEQ ID NO: 3196 - RNA, 19 nt, Artificial Sequence
  Synthetic oligonucleotide
cugauucaggcuuggccug

SEQ ID NO: 3197 - RNA, 19 nt, Artificial Sequence
  Synthetic oligonucleotide
caagcaacauggucaguuu

SEQ ID NO: 3198 - RNA, 19 nt, Artificial Sequence
  Synthetic oligonucleotide
aagcaacauggucaguuuu

SEQ ID NO: 3199 - RNA, 19 nt, Artificial Sequence
  Synthetic oligonucleotide
agcaacauggucaguuuuc

SEQ ID NO: 3200 - RNA, 19 nt, Artificial Sequence
  Synthetic oligonucleotide
acaauaaacuggaaaaaac

SEQ ID NO: 3201 - RNA, 19 nt, Artificial Sequence
  Synthetic oligonucleotide
ucaggccaugaacaucacc

SEQ ID NO: 3202 - RNA, 19 nt, Artificial Sequence
  Synthetic oligonucleotide
caggccaugaacaucaccu

SEQ ID NO: 3203 - RNA, 19 nt, Artificial Sequence
  Synthetic oligonucleotide
uauccagugugcccacuac

SEQ ID NO: 3204 - RNA, 19 nt, Artificial Sequence
  Synthetic oligonucleotide
auccagugugcccacuaca

SEQ ID NO: 3205 - RNA, 19 nt, Artificial Sequence
  Synthetic oligonucleotide
uccagugugcccacuacau

SEQ ID NO: 3206 - RNA, 19 nt, Artificial Sequence
  Synthetic oligonucleotide
ccagugugcccacuacauu

SEQ ID NO: 3207 - RNA, 19 nt, Artificial Sequence
  Synthetic oligonucleotide
cagugugcccacuacauug

SEQ ID NO: 3208 - RNA, 19 nt, Artificial Sequence
  Synthetic oligonucleotide
ugaauucaaaaagaucaaa

SEQ ID NO: 3209 - RNA, 19 nt, Artificial Sequence
  Synthetic oligonucleotide
gaauucaaaaagaucaaag

SEQ ID NO: 3210 - RNA, 19 nt, Artificial Sequence
  Synthetic oligonucleotide
acucuggaucccagaaggu

SEQ ID NO: 3211 - RNA, 19 nt, Artificial Sequence
  Synthetic oligonucleotide
cucuggaucccagaaggug

SEQ ID NO: 3212 - RNA, 19 nt, Artificial Sequence
  Synthetic oligonucleotide
ucuggaucccagaagguga

SEQ ID NO: 3213 - RNA, 19 nt, Artificial Sequence
  Synthetic oligonucleotide
cuggaucccagaaggugag

SEQ ID NO: 3214 - RNA, 19 nt, Artificial Sequence
  Synthetic oligonucleotide
uggaucccagaaggugaga

SEQ ID NO: 3215 - RNA, 19 nt, Artificial Sequence
  Synthetic oligonucleotide
ggaucccagaaggugagaa

SEQ ID NO: 3216 - RNA, 19 nt, Artificial Sequence
  Synthetic oligonucleotide
gaucccagaaggugagaaa

SEQ ID NO: 3217 - RNA, 19 nt, Artificial Sequence
  Synthetic oligonucleotide
aucccagaaggugagaaag

SEQ ID NO: 3218 - RNA, 19 nt, Artificial Sequence
  Synthetic oligonucleotide
gcagcaugucaagaucaca

SEQ ID NO: 3219 - RNA, 19 nt, Artificial Sequence
  Synthetic oligonucleotide
cagcaugucaagaucacag

SEQ ID NO: 3220 - RNA, 19 nt, Artificial Sequence
  Synthetic oligonucleotide
agcaugucaagaucacaga

SEQ ID NO: 3221 - RNA, 19 nt, Artificial Sequence
  Synthetic oligonucleotide
gcaugucaagaucacagau

SEQ ID NO: 3222 - RNA, 19 nt, Artificial Sequence
  Synthetic oligonucleotide
caugucaagaucacagauu

SEQ ID NO: 3223 - RNA, 19 nt, Artificial Sequence
  Synthetic oligonucleotide
augucaagaucacagauuu

SEQ ID NO: 3224 - RNA, 19 nt, Artificial Sequence
  Synthetic oligonucleotide
ugucaagaucacagauuuu

SEQ ID NO: 3225 - RNA, 19 nt, Artificial Sequence
  Synthetic oligonucleotide
gucaagaucacagauuuug

SEQ ID NO: 3226 - RNA, 19 nt, Artificial Sequence
  Synthetic oligonucleotide
ucaagaucacagauuuugg

SEQ ID NO: 3227 - RNA, 19 nt, Artificial Sequence
  Synthetic oligonucleotide
caagaucacagauuuuggg

SEQ ID NO: 3228 - RNA, 19 nt, Artificial Sequence
  Synthetic oligonucleotide
aagaucacagauuuugggc

SEQ ID NO: 3229 - RNA, 19 nt, Artificial Sequence
  Synthetic oligonucleotide
agaucacagauuuugggcu

SEQ ID NO: 3230 - RNA, 19 nt, Artificial Sequence
  Synthetic oligonucleotide
gaucacagauuuugggcug

SEQ ID NO: 3231 - RNA, 19 nt, Artificial Sequence
  Synthetic oligonucleotide
aucacagauuuugggcugg

SEQ ID NO: 3232 - RNA, 19 nt, Artificial Sequence
  Synthetic oligonucleotide
ucacagauuuugggcuggc

SEQ ID NO: 3233 - RNA, 19 nt, Artificial Sequence
  Synthetic oligonucleotide
cacagauuuugggcuggcc

SEQ ID NO: 3234 - RNA, 19 nt, Artificial Sequence
  Synthetic oligonucleotide
acagauuuugggcuggcca

SEQ ID NO: 3235 - RNA, 19 nt, Artificial Sequence
  Synthetic oligonucleotide
cagauuuugggcuggccaa

SEQ ID NO: 3236 - RNA, 19 nt, Artificial Sequence
  Synthetic oligonucleotide
agauuuugggcuggccaaa

SEQ ID NO: 3237 - RNA, 19 nt, Artificial Sequence
  Synthetic oligonucleotide
gauuuugggcuggccaaac

SEQ ID NO: 3238 - RNA, 19 nt, Artificial Sequence
  Synthetic oligonucleotide
auuuugggcuggccaaacu

SEQ ID NO: 3239 - RNA, 19 nt, Artificial Sequence
  Synthetic oligonucleotide
uuuugggcuggccaaacug

SEQ ID NO: 3240 - RNA, 19 nt, Artificial Sequence
  Synthetic oligonucleotide
uuugggcuggccaaacugc

SEQ ID NO: 3241 - RNA, 19 nt, Artificial Sequence
  Synthetic oligonucleotide
ggcaaagugccuaucaagu

SEQ ID NO: 3242 - RNA, 19 nt, Artificial Sequence
  Synthetic oligonucleotide
gcaaagugccuaucaagug

SEQ ID NO: 3243 - RNA, 19 nt, Artificial Sequence
  Synthetic oligonucleotide
caaagugccuaucaagugg

SEQ ID NO: 3244 - RNA, 19 nt, Artificial Sequence
  Synthetic oligonucleotide
aaagugccuaucaagugga

SEQ ID NO: 3245 - RNA, 19 nt, Artificial Sequence
  Synthetic oligonucleotide
aagugccuaucaaguggau

SEQ ID NO: 3246 - RNA, 19 nt, Artificial Sequence
  Synthetic oligonucleotide
agugccuaucaaguggaug

SEQ ID NO: 3247 - RNA, 19 nt, Artificial Sequence
  Synthetic oligonucleotide
gugccuaucaaguggaugg

SEQ ID NO: 3248 - RNA, 19 nt, Artificial Sequence
  Synthetic oligonucleotide
uaccaucgaugucuacaug

SEQ ID NO: 3249 - RNA, 19 nt, Artificial Sequence
  Synthetic oligonucleotide
accaucgaugucuacauga

SEQ ID NO: 3250 - RNA, 19 nt, Artificial Sequence
  Synthetic oligonucleotide
ccaucgaugucuacaugau

SEQ ID NO: 3251 - RNA, 19 nt, Artificial Sequence
  Synthetic oligonucleotide
caucgaugucuacaugauc

SEQ ID NO: 3252 - RNA, 19 nt, Artificial Sequence
  Synthetic oligonucleotide
aucgaugucuacaugauca

SEQ ID NO: 3253 - RNA, 19 nt, Artificial Sequence
  Synthetic oligonucleotide
ucgaugucuacaugaucau

SEQ ID NO: 3254 - RNA, 19 nt, Artificial Sequence
  Synthetic oligonucleotide
cgaugucuacaugaucaug

SEQ ID NO: 3255 - RNA, 19 nt, Artificial Sequence
  Synthetic oligonucleotide
gaugucuacaugaucaugg

SEQ ID NO: 3256 - RNA, 19 nt, Artificial Sequence
  Synthetic oligonucleotide
augucuacaugaucauggu

SEQ ID NO: 3257 - RNA, 19 nt, Artificial Sequence
  Synthetic oligonucleotide
ugucuacaugaucaugguc

SEQ ID NO: 3258 - RNA, 19 nt, Artificial Sequence
  Synthetic oligonucleotide
gucuacaugaucaugguca

SEQ ID NO: 3259 - RNA, 19 nt, Artificial Sequence
  Synthetic oligonucleotide
ucuacaugaucauggucaa

SEQ ID NO: 3260 - RNA, 19 nt, Artificial Sequence
  Synthetic oligonucleotide
cuacaugaucauggucaag

SEQ ID NO: 3261 - RNA, 19 nt, Artificial Sequence
  Synthetic oligonucleotide
uacaugaucauggucaagu

SEQ ID NO: 3262 - RNA, 19 nt, Artificial Sequence
  Synthetic oligonucleotide
acaugaucauggucaagug

SEQ ID NO: 3263 - RNA, 19 nt, Artificial Sequence
  Synthetic oligonucleotide
caugaucauggucaagugc

SEQ ID NO: 3264 - RNA, 19 nt, Artificial Sequence
  Synthetic oligonucleotide
augaucauggucaagugcu

SEQ ID NO: 3265 - RNA, 19 nt, Artificial Sequence
  Synthetic oligonucleotide
ugaucauggucaagugcug

SEQ ID NO: 3266 - RNA, 19 nt, Artificial Sequence
  Synthetic oligonucleotide
gaucauggucaagugcugg

SEQ ID NO: 3267 - RNA, 19 nt, Artificial Sequence
  Synthetic oligonucleotide
aucauggucaagugcugga

SEQ ID NO: 3268 - RNA, 19 nt, Artificial Sequence
  Synthetic oligonucleotide
ucauggucaagugcuggau

SEQ ID NO: 3269 - RNA, 19 nt, Artificial Sequence
  Synthetic oligonucleotide
cauggucaagugcuggaug

SEQ ID NO: 3270 - RNA, 19 nt, Artificial Sequence
  Synthetic oligonucleotide
auggucaagugcuggauga

SEQ ID NO: 3271 - RNA, 19 nt, Artificial Sequence
  Synthetic oligonucleotide
uggucaagugcuggaugau

SEQ ID NO: 3272 - RNA, 19 nt, Artificial Sequence
  Synthetic oligonucleotide
ggucaagugcuggaugaua

SEQ ID NO: 3273 - RNA, 19 nt, Artificial Sequence
  Synthetic oligonucleotide
gucaagugcuggaugauag

SEQ ID NO: 3274 - RNA, 19 nt, Artificial Sequence
  Synthetic oligonucleotide
cgaauucuccaaaauggcc

SEQ ID NO: 3275 - RNA, 19 nt, Artificial Sequence
  Synthetic oligonucleotide
gaauucuccaaaauggccc

SEQ ID NO: 3276 - RNA, 19 nt, Artificial Sequence
  Synthetic oligonucleotide
ggaugaaagaaugcauuug

SEQ ID NO: 3277 - RNA, 19 nt, Artificial Sequence
  Synthetic oligonucleotide
gaugaaagaaugcauuugc

SEQ ID NO: 3278 - RNA, 19 nt, Artificial Sequence
  Synthetic oligonucleotide
augaaagaaugcauuugcc

SEQ ID NO: 3279 - RNA, 19 nt, Artificial Sequence
  Synthetic oligonucleotide
ugaaagaaugcauuugcca

SEQ ID NO: 3280 - RNA, 19 nt, Artificial Sequence
  Synthetic oligonucleotide
gaaagaaugcauuugccaa

SEQ ID NO: 3281 - RNA, 19 nt, Artificial Sequence
  Synthetic oligonucleotide
ggacaacccugacuaccag

SEQ ID NO: 3282 - RNA, 19 nt, Artificial Sequence
  Synthetic oligonucleotide
gacaacccugacuaccagc

SEQ ID NO: 3283 - RNA, 19 nt, Artificial Sequence
  Synthetic oligonucleotide
acaacccugacuaccagca

SEQ ID NO: 3284 - RNA, 19 nt, Artificial Sequence
  Synthetic oligonucleotide
caacccugacuaccagcag

SEQ ID NO: 3285 - RNA, 19 nt, Artificial Sequence
  Synthetic oligonucleotide
aacccugacuaccagcagg

SEQ ID NO: 3286 - RNA, 19 nt, Artificial Sequence
  Synthetic oligonucleotide
acccugacuaccagcagga

SEQ ID NO: 3287 - RNA, 19 nt, Artificial Sequence
  Synthetic oligonucleotide
cccugacuaccagcaggac

SEQ ID NO: 3288 - RNA, 19 nt, Artificial Sequence
  Synthetic oligonucleotide
ccugacuaccagcaggacu

SEQ ID NO: 3289 - RNA, 19 nt, Artificial Sequence
  Synthetic oligonucleotide
ggcgcagcgcggccgcagc

SEQ ID NO: 3290 - RNA, 19 nt, Artificial Sequence
  Synthetic oligonucleotide
gcgcagcgcggccgcagca

SEQ ID NO: 3291 - RNA, 19 nt, Artificial Sequence
  Synthetic oligonucleotide
gcagcgcggccgcagcagc

SEQ ID NO: 3292 - RNA, 19 nt, Artificial Sequence
  Synthetic oligonucleotide
cagcgcuccuggcgcugcu

SEQ ID NO: 3293 - RNA, 19 nt, Artificial Sequence
  Synthetic oligonucleotide
gcgcuccuggcgcugcugg

SEQ ID NO: 3294 - RNA, 19 nt, Artificial Sequence
  Synthetic oligonucleotide
gcuccuggcgcugcuggcu

SEQ ID NO: 3295 - RNA, 19 nt, Artificial Sequence
  Synthetic oligonucleotide
caguugggcacuuuugaag

SEQ ID NO: 3296 - RNA, 19 nt, Artificial Sequence
  Synthetic oligonucleotide
ugggaauuuggaaauuacc

SEQ ID NO: 3297 - RNA, 19 nt, Artificial Sequence
  Synthetic oligonucleotide
aauuaugaucuuuccuucu

SEQ ID NO: 3298 - RNA, 19 nt, Artificial Sequence
  Synthetic oligonucleotide
guggcugguuauguccuca

SEQ ID NO: 3299 - RNA, 19 nt, Artificial Sequence
  Synthetic oligonucleotide
ugcccaugagaaauuuaca

SEQ ID NO: 3300 - RNA, 19 nt, Artificial Sequence
  Synthetic oligonucleotide
ccugcauggcgccgugcgg

SEQ ID NO: 3301 - RNA, 19 nt, Artificial Sequence
  Synthetic oligonucleotide
uggcgccgugcgguucagc

SEQ ID NO: 3302 - RNA, 19 nt, Artificial Sequence
  Synthetic oligonucleotide
uggcgccgugcgguucagc

SEQ ID NO: 3303 - RNA, 19 nt, Artificial Sequence
  Synthetic oligonucleotide
gcgccgugcgguucagcaa

SEQ ID NO: 3304 - RNA, 19 nt, Artificial Sequence
  Synthetic oligonucleotide
cgccgugcgguucagcaac

SEQ ID NO: 3305 - RNA, 19 nt, Artificial Sequence
  Synthetic oligonucleotide
cagcugccaaaagugugau

SEQ ID NO: 3306 - RNA, 19 nt, Artificial Sequence
  Synthetic oligonucleotide
aucugugcccagcagugcu

SEQ ID NO: 3307 - RNA, 19 nt, Artificial Sequence
  Synthetic oligonucleotide
cugugcccagcagugcucc

SEQ ID NO: 3308 - RNA, 19 nt, Artificial Sequence
  Synthetic oligonucleotide
gugcuccgggcgcugccgu

SEQ ID NO: 3309 - RNA, 19 nt, Artificial Sequence
  Synthetic oligonucleotide
gagagcgacugccuggucu

SEQ ID NO: 3310 - RNA, 19 nt, Artificial Sequence
  Synthetic oligonucleotide
cugccuggucugccgcaaa

SEQ ID NO: 3311 - RNA, 19 nt, Artificial Sequence
  Synthetic oligonucleotide
gacagaucacggcucgugc

SEQ ID NO: 3312 - RNA, 19 nt, Artificial Sequence
  Synthetic oligonucleotide
ccgcaaaguguguaacgga

SEQ ID NO: 3313 - RNA, 19 nt, Artificial Sequence
  Synthetic oligonucleotide
cggaauagguauuggugaa

SEQ ID NO: 3314 - RNA, 19 nt, Artificial Sequence
  Synthetic oligonucleotide
cuacgaauauuaaacacuu

SEQ ID NO: 3315 - RNA, 19 nt, Artificial Sequence
  Synthetic oligonucleotide
ccacaggaacuggauauuc

SEQ ID NO: 3316 - RNA, 19 nt, Artificial Sequence
  Synthetic oligonucleotide
cacaggguuuuugcugauu

SEQ ID NO: 3317 - RNA, 19 nt, Artificial Sequence
  Synthetic oligonucleotide
uucaggaaacaaaaauuug

SEQ ID NO: 3318 - RNA, 19 nt, Artificial Sequence
  Synthetic oligonucleotide
gugcuaugcaaauacaaua

SEQ ID NO: 3319 - RNA, 19 nt, Artificial Sequence
  Synthetic oligonucleotide
ccggucagaaaaccaaaau

SEQ ID NO: 3320 - RNA, 19 nt, Artificial Sequence
  Synthetic oligonucleotide
cugcgucucuugccggaau

SEQ ID NO: 3321 - RNA, 19 nt, Artificial Sequence
  Synthetic oligonucleotide
gggcccuccucuugcugcu

SEQ ID NO: 3322 - RNA, 19 nt, Artificial Sequence
  Synthetic oligonucleotide
ggcccuccucuugcugcug

SEQ ID NO: 3323 - RNA, 19 nt, Artificial Sequence
  Synthetic oligonucleotide
cuccucuugcugcuggugg

SEQ ID NO: 3324 - RNA, 19 nt, Artificial Sequence
  Synthetic oligonucleotide
uccucuugcugcugguggu

SEQ ID NO: 3325 - RNA, 19 nt, Artificial Sequence
  Synthetic oligonucleotide
cggaagcgcacgcugcgga

SEQ ID NO: 3326 - RNA, 19 nt, Artificial Sequence
  Synthetic oligonucleotide
aagcgcacgcugcggaggc

SEQ ID NO: 3327 - RNA, 19 nt, Artificial Sequence
  Synthetic oligonucleotide
aacugaauucaaaaagauc

SEQ ID NO: 3328 - RNA, 19 nt, Artificial Sequence
  Synthetic oligonucleotide
caaagugcugggcuccggu

SEQ ID NO: 3329 - RNA, 19 nt, Artificial Sequence
  Synthetic oligonucleotide
aagugcugggcuccggugc

SEQ ID NO: 3330 - RNA, 19 nt, Artificial Sequence
  Synthetic oligonucleotide
agugcugggcuccggugcg

SEQ ID NO: 3331 - RNA, 19 nt, Artificial Sequence
  Synthetic oligonucleotide
gugcugggcuccggugcgu

SEQ ID NO: 3332 - RNA, 19 nt, Artificial Sequence
  Synthetic oligonucleotide
ugcugggcuccggugcguu

SEQ ID NO: 3333 - RNA, 19 nt, Artificial Sequence
  Synthetic oligonucleotide
cgugugccgccugcugggc

SEQ ID NO: 3334 - RNA, 19 nt, Artificial Sequence
  Synthetic oligonucleotide
gugugccgccugcugggca

SEQ ID NO: 3335 - RNA, 19 nt, Artificial Sequence
  Synthetic oligonucleotide
gugccgccugcugggcauc

SEQ ID NO: 3336 - RNA, 19 nt, Artificial Sequence
  Synthetic oligonucleotide
caccgugcagcucaucacg

SEQ ID NO: 3337 - RNA, 19 nt, Artificial Sequence
  Synthetic oligonucleotide
cgugcagcucaucacgcag

SEQ ID NO: 3338 - RNA, 19 nt, Artificial Sequence
  Synthetic oligonucleotide
cagcucaucacgcagcuca

SEQ ID NO: 3339 - RNA, 19 nt, Artificial Sequence
  Synthetic oligonucleotide
agcucaucacgcagcucau

SEQ ID NO: 3340 - RNA, 19 nt, Artificial Sequence
  Synthetic oligonucleotide
cagcucaugcccuucggcu

SEQ ID NO: 3341 - RNA, 19 nt, Artificial Sequence
  Synthetic oligonucleotide
agcucaugcccuucggcug

SEQ ID NO: 3342 - RNA, 19 nt, Artificial Sequence
  Synthetic oligonucleotide
uuggaggaccgucgcuugg

SEQ ID NO: 3343 - RNA, 19 nt, Artificial Sequence
  Synthetic oligonucleotide
ggaggaccgucgcuuggug

SEQ ID NO: 3344 - RNA, 19 nt, Artificial Sequence
  Synthetic oligonucleotide
gaggaccgucgcuuggugc

SEQ ID NO: 3345 - RNA, 19 nt, Artificial Sequence
  Synthetic oligonucleotide
aggaccgucgcuuggugca

SEQ ID NO: 3346 - RNA, 19 nt, Artificial Sequence
  Synthetic oligonucleotide
gaccgucgcuuggugcacc

SEQ ID NO: 3347 - RNA, 19 nt, Artificial Sequence
  Synthetic oligonucleotide
ccgucgcuuggugcaccgc

SEQ ID NO: 3348 - RNA, 19 nt, Artificial Sequence
  Synthetic oligonucleotide
gucgcuuggugcaccgcga

SEQ ID NO: 3349 - RNA, 19 nt, Artificial Sequence
  Synthetic oligonucleotide
ucgcuuggugcaccgcgac

SEQ ID NO: 3350 - RNA, 19 nt, Artificial Sequence
  Synthetic oligonucleotide
gcuuggugcaccgcgaccu

SEQ ID NO: 3351 - RNA, 19 nt, Artificial Sequence
  Synthetic oligonucleotide
ggcauuggaaucaauuuua

SEQ ID NO: 3352 - RNA, 19 nt, Artificial Sequence
  Synthetic oligonucleotide
ucaagugcuggaugauaga

SEQ ID NO: 3353 - RNA, 19 nt, Artificial Sequence
  Synthetic oligonucleotide
aagugcuggaugauagacg

SEQ ID NO: 3354 - RNA, 19 nt, Artificial Sequence
  Synthetic oligonucleotide
agugcuggaugauagacgc

SEQ ID NO: 3355 - RNA, 19 nt, Artificial Sequence
  Synthetic oligonucleotide
ugcuggaugauagacgcag

SEQ ID NO: 3356 - RNA, 19 nt, Artificial Sequence
  Synthetic oligonucleotide
cuccugagcucucugagug

SEQ ID NO: 3357 - RNA, 19 nt, Artificial Sequence
  Synthetic oligonucleotide
cugagcucucugagugcaa

SEQ ID NO: 3358 - RNA, 19 nt, Artificial Sequence
  Synthetic oligonucleotide
aagcugucccaucaaggaa

SEQ ID NO: 3359 - RNA, 19 nt, Artificial Sequence
  Synthetic oligonucleotide
agcugucccaucaaggaag

SEQ ID NO: 3360 - RNA, 19 nt, Artificial Sequence
  Synthetic oligonucleotide
aagacagcuucuugcagcg

SEQ ID NO: 3361 - RNA, 19 nt, Artificial Sequence
  Synthetic oligonucleotide
agacagcuucuugcagcga

SEQ ID NO: 3362 - RNA, 19 nt, Artificial Sequence
  Synthetic oligonucleotide
gacagcuucuugcagcgau

SEQ ID NO: 3363 - RNA, 19 nt, Artificial Sequence
  Synthetic oligonucleotide
acagcuucuugcagcgaua

SEQ ID NO: 3364 - RNA, 19 nt, Artificial Sequence
  Synthetic oligonucleotide
cagcuucuugcagcgauac

SEQ ID NO: 3365 - RNA, 19 nt, Artificial Sequence
  Synthetic oligonucleotide
gcuucuugcagcgauacag

SEQ ID NO: 3366 - RNA, 19 nt, Artificial Sequence
  Synthetic oligonucleotide
ccacaaagcagugaauuua

SEQ ID NO: 3367 - RNA, 19 nt, Artificial Sequence
  Synthetic oligonucleotide
guauauuugaaaaaaaaaa

SEQ ID NO: 3368 - RNA, 19 nt, Artificial Sequence
  Synthetic oligonucleotide
ugugaggauuuuuauugau

SEQ ID NO: 3369 - RNA, 19 nt, Artificial Sequence
  Synthetic oligonucleotide
cgcuauugauuuuuacuuc

SEQ ID NO: 3370 - RNA, 19 nt, Artificial Sequence
  Synthetic oligonucleotide
aaggaagaagcuugcuggu

SEQ ID NO: 3371 - RNA, 19 nt, Artificial Sequence
  Synthetic oligonucleotide
aggaagaagcuugcuggua

SEQ ID NO: 3372 - RNA, 19 nt, Artificial Sequence
  Synthetic oligonucleotide
ggaagaagcuugcugguag

SEQ ID NO: 3373 - RNA, 19 nt, Artificial Sequence
  Synthetic oligonucleotide
gaagaagcuugcugguagc

SEQ ID NO: 3374 - RNA, 19 nt, Artificial Sequence
  Synthetic oligonucleotide
aagaagcuugcugguagca

SEQ ID NO: 3375 - RNA, 19 nt, Artificial Sequence
  Synthetic oligonucleotide
gaagcuugcugguagcacu

SEQ ID NO: 3376 - RNA, 19 nt, Artificial Sequence
  Synthetic oligonucleotide
aagcuugcugguagcacuu

SEQ ID NO: 3377 - RNA, 19 nt, Artificial Sequence
  Synthetic oligonucleotide
agcuugcugguagcacuug

SEQ ID NO: 3378 - RNA, 19 nt, Artificial Sequence
  Synthetic oligonucleotide
gcuugcugguagcacuugc

SEQ ID NO: 3379 - RNA, 19 nt, Artificial Sequence
  Synthetic oligonucleotide
cuugcugguagcacuugcu

SEQ ID NO: 3380 - RNA, 19 nt, Artificial Sequence
  Synthetic oligonucleotide
uugcugguagcacuugcua

SEQ ID NO: 3381 - RNA, 19 nt, Artificial Sequence
  Synthetic oligonucleotide
ggaugcuugauuccagugg

SEQ ID NO: 3382 - RNA, 19 nt, Artificial Sequence
  Synthetic oligonucleotide
gaugcuugauuccaguggu

SEQ ID NO: 3383 - RNA, 19 nt, Artificial Sequence
  Synthetic oligonucleotide
agcaggccggaucgguacu

SEQ ID NO: 3384 - RNA, 19 nt, Artificial Sequence
  Synthetic oligonucleotide
gccggaucgguacuguauc

SEQ ID NO: 3385 - RNA, 19 nt, Artificial Sequence
  Synthetic oligonucleotide
uccuuagacuuacuuuugu

SEQ ID NO: 3386 - RNA, 19 nt, Artificial Sequence
  Synthetic oligonucleotide
cugucuugcugucaugaaa

SEQ ID NO: 3387 - RNA, 19 nt, Artificial Sequence
  Synthetic oligonucleotide
ccuaaggauagcaccgcuu

SEQ ID NO: 3388 - RNA, 19 nt, Artificial Sequence
  Synthetic oligonucleotide
uaaggauagcaccgcuuuu

SEQ ID NO: 3389 - RNA, 19 nt, Artificial Sequence
  Synthetic oligonucleotide
aaggauagcaccgcuuuug

SEQ ID NO: 3390 - RNA, 19 nt, Artificial Sequence
  Synthetic oligonucleotide
aggauagcaccgcuuuugu

SEQ ID NO: 3391 - RNA, 19 nt, Artificial Sequence
  Synthetic oligonucleotide
ggauagcaccgcuuuuguu

SEQ ID NO: 3392 - RNA, 19 nt, Artificial Sequence
  Synthetic oligonucleotide
gauagcaccgcuuuuguuc

SEQ ID NO: 3393 - RNA, 19 nt, Artificial Sequence
  Synthetic oligonucleotide
auagcaccgcuuuuguucu

SEQ ID NO: 3394 - RNA, 19 nt, Artificial Sequence
  Synthetic oligonucleotide
uagcaccgcuuuuguucuc

SEQ ID NO: 3395 - RNA, 19 nt, Artificial Sequence
  Synthetic oligonucleotide
agcaccgcuuuuguucucg

SEQ ID NO: 3396 - RNA, 19 nt, Artificial Sequence
  Synthetic oligonucleotide
accgcuuuuguucucgcaa

SEQ ID NO: 3397 - RNA, 19 nt, Artificial Sequence
  Synthetic oligonucleotide
ccgcuuuuguucucgcaaa

SEQ ID NO: 3398 - RNA, 19 nt, Artificial Sequence
  Synthetic oligonucleotide
cgcuuuuguucucgcaaaa

SEQ ID NO: 3399 - RNA, 19 nt, Artificial Sequence
  Synthetic oligonucleotide
gcuuuuguucucgcaaaaa

SEQ ID NO: 3400 - RNA, 19 nt, Artificial Sequence
  Synthetic oligonucleotide
uguucucgcaaaaacguau

SEQ ID NO: 3401 - RNA, 19 nt, Artificial Sequence
  Synthetic oligonucleotide
caaaauuaguuuguguuac

SEQ ID NO: 3402 - RNA, 19 nt, Artificial Sequence
  Synthetic oligonucleotide
acuuauggaagauaguuuu

SEQ ID NO: 3403 - RNA, 19 nt, Artificial Sequence
  Synthetic oligonucleotide
cuucaaaagcuuuuuacuc

SEQ ID NO: 3404 - RNA, 19 nt, Artificial Sequence
  Synthetic oligonucleotide
aaacuaggguuugaaauug

SEQ ID NO: 3405 - RNA, 19 nt, Artificial Sequence
  Synthetic oligonucleotide
ccuaaaauaauuucucuac

SEQ ID NO: 3406 - RNA, 19 nt, Artificial Sequence
  Synthetic oligonucleotide
aacagcaguccuuuguaaa

SEQ ID NO: 3407 - RNA, 19 nt, Artificial Sequence
  Synthetic oligonucleotide
uccaauuuaucaaggaaga

SEQ ID NO: 3408 - RNA, 19 nt, Artificial Sequence
  Synthetic oligonucleotide
cauacaaaauguuccuuuu

SEQ ID NO: 3409 - RNA, 19 nt, Artificial Sequence
  Synthetic oligonucleotide
auguuccuuuugcuuuuaa

SEQ ID NO: 3410 - RNA, 19 nt, Artificial Sequence
  Synthetic oligonucleotide
uguuccuuuugcuuuuaaa

SEQ ID NO: 3411 - RNA, 19 nt, Artificial Sequence
  Synthetic oligonucleotide
uuuugcuuuuaaaguaauu

SEQ ID NO: 3412 - RNA, 19 nt, Artificial Sequence
  Synthetic oligonucleotide
uuguuaagaaaguauuuga

SEQ ID NO: 3413 - RNA, 19 nt, Artificial Sequence
  Synthetic oligonucleotide
auuuggaaauuaccuaugu

SEQ ID NO: 3414 - RNA, 19 nt, Artificial Sequence
  Synthetic oligonucleotide
uuuggaaauuaccuaugug

SEQ ID NO: 3415 - RNA, 19 nt, Artificial Sequence
  Synthetic oligonucleotide
aucuuuccuucuuaaagac

SEQ ID NO: 3416 - RNA, 19 nt, Artificial Sequence
  Synthetic oligonucleotide
ucuuuccuucuuaaagacc

SEQ ID NO: 3417 - RNA, 19 nt, Artificial Sequence
  Synthetic oligonucleotide
cuuuccuucuuaaagacca

SEQ ID NO: 3418 - RNA, 19 nt, Artificial Sequence
  Synthetic oligonucleotide
uuuccuucuuaaagaccau

SEQ ID NO: 3419 - RNA, 19 nt, Artificial Sequence
  Synthetic oligonucleotide
uuccuucuuaaagaccauc

SEQ ID NO: 3420 - RNA, 19 nt, Artificial Sequence
  Synthetic oligonucleotide
uccuucuuaaagaccaucc

SEQ ID NO: 3421 - RNA, 19 nt, Artificial Sequence
  Synthetic oligonucleotide
ccuucuuaaagaccaucca

SEQ ID NO: 3422 - RNA, 19 nt, Artificial Sequence
  Synthetic oligonucleotide
cuucuuaaagaccauccag

SEQ ID NO: 3423 - RNA, 19 nt, Artificial Sequence
  Synthetic oligonucleotide
uucuuaaagaccauccagg

SEQ ID NO: 3424 - RNA, 19 nt, Artificial Sequence
  Synthetic oligonucleotide
ucuuaaagaccauccagga

SEQ ID NO: 3425 - RNA, 19 nt, Artificial Sequence
  Synthetic oligonucleotide
cuuaaagaccauccaggag

SEQ ID NO: 3426 - RNA, 19 nt, Artificial Sequence
  Synthetic oligonucleotide
uuaaagaccauccaggagg

SEQ ID NO: 3427 - RNA, 19 nt, Artificial Sequence
  Synthetic oligonucleotide
uaaagaccauccaggaggu

SEQ ID NO: 3428 - RNA, 19 nt, Artificial Sequence
  Synthetic oligonucleotide
aaagaccauccaggaggug

SEQ ID NO: 3429 - RNA, 19 nt, Artificial Sequence
  Synthetic oligonucleotide
agugugauccaagcugucc

SEQ ID NO: 3430 - RNA, 19 nt, Artificial Sequence
  Synthetic oligonucleotide
gugugauccaagcuguccc

SEQ ID NO: 3431 - RNA, 19 nt, Artificial Sequence
  Synthetic oligonucleotide
ugugauccaagcuguccca

SEQ ID NO: 3432 - RNA, 19 nt, Artificial Sequence
  Synthetic oligonucleotide
gugauccaagcugucccaa

SEQ ID NO: 3433 - RNA, 19 nt, Artificial Sequence
  Synthetic oligonucleotide
ugauccaagcugucccaau

SEQ ID NO: 3434 - RNA, 19 nt, Artificial Sequence
  Synthetic oligonucleotide
gcaggagaggagaacugcc

SEQ ID NO: 3435 - RNA, 19 nt, Artificial Sequence
  Synthetic oligonucleotide
caggagaggagaacugcca

SEQ ID NO: 3436 - RNA, 19 nt, Artificial Sequence
  Synthetic oligonucleotide
aggagaggagaacugccag

SEQ ID NO: 3437 - RNA, 19 nt, Artificial Sequence
  Synthetic oligonucleotide
ggagaggagaacugccaga

SEQ ID NO: 3438 - RNA, 19 nt, Artificial Sequence
  Synthetic oligonucleotide
acugaccaaaaucaucugu

SEQ ID NO: 3439 - RNA, 19 nt, Artificial Sequence
  Synthetic oligonucleotide
cugaccaaaaucaucugug

SEQ ID NO: 3440 - RNA, 19 nt, Artificial Sequence
  Synthetic oligonucleotide
ugaccaaaaucaucugugc

SEQ ID NO: 3441 - RNA, 19 nt, Artificial Sequence
  Synthetic oligonucleotide
gaccaaaaucaucugugcc

SEQ ID NO: 3442 - RNA, 19 nt, Artificial Sequence
  Synthetic oligonucleotide
accaaaaucaucugugccc

SEQ ID NO: 3443 - RNA, 19 nt, Artificial Sequence
  Synthetic oligonucleotide
ccaaaaucaucugugccca

SEQ ID NO: 3444 - RNA, 19 nt, Artificial Sequence
  Synthetic oligonucleotide
caaaaucaucugugcccag

SEQ ID NO: 3445 - RNA, 19 nt, Artificial Sequence
  Synthetic oligonucleotide
cccagugacugcugccaca

SEQ ID NO: 3446 - RNA, 19 nt, Artificial Sequence
  Synthetic oligonucleotide
ccagugacugcugccacaa

SEQ ID NO: 3447 - RNA, 19 nt, Artificial Sequence
  Synthetic oligonucleotide
cagugacugcugccacaac

SEQ ID NO: 3448 - RNA, 19 nt, Artificial Sequence
  Synthetic oligonucleotide
cucacucuccauaaaugcu

SEQ ID NO: 3449 - RNA, 19 nt, Artificial Sequence
  Synthetic oligonucleotide
gguuuuugcugauucaggc

SEQ ID NO: 3450 - RNA, 19 nt, Artificial Sequence
  Synthetic oligonucleotide
guuuuugcugauucaggcu

SEQ ID NO: 3451 - RNA, 19 nt, Artificial Sequence
  Synthetic oligonucleotide
uuuuugcugauucaggcuu

SEQ ID NO: 3452 - RNA, 19 nt, Artificial Sequence
  Synthetic oligonucleotide
uuuugcugauucaggcuug

SEQ ID NO: 3453 - RNA, 19 nt, Artificial Sequence
  Synthetic oligonucleotide
uuugcugauucaggcuugg

SEQ ID NO: 3454 - RNA, 19 nt, Artificial Sequence
  Synthetic oligonucleotide
uugcugauucaggcuuggc

SEQ ID NO: 3455 - RNA, 19 nt, Artificial Sequence
  Synthetic oligonucleotide
ugcugauucaggcuuggcc

SEQ ID NO: 3456 - RNA, 19 nt, Artificial Sequence
  Synthetic oligonucleotide
gcugauucaggcuuggccu

SEQ ID NO: 3457 - RNA, 19 nt, Artificial Sequence
  Synthetic oligonucleotide
ccaagcaacauggucaguu

SEQ ID NO: 3458 - RNA, 19 nt, Artificial Sequence
  Synthetic oligonucleotide
caagcaacauggucaguuu

SEQ ID NO: 3459 - RNA, 19 nt, Artificial Sequence
  Synthetic oligonucleotide
aagcaacauggucaguuuu

SEQ ID NO: 3460 - RNA, 19 nt, Artificial Sequence
  Synthetic oligonucleotide
uacaauaaacuggaaaaaa

SEQ ID NO: 3461 - RNA, 19 nt, Artificial Sequence
  Synthetic oligonucleotide
cucaggccaugaacaucac

SEQ ID NO: 3462 - RNA, 19 nt, Artificial Sequence
  Synthetic oligonucleotide
ucaggccaugaacaucacc

SEQ ID NO: 3463 - RNA, 19 nt, Artificial Sequence
  Synthetic oligonucleotide
guauccagugugcccacua

SEQ ID NO: 3464 - RNA, 19 nt, Artificial Sequence
  Synthetic oligonucleotide
uauccagugugcccacuac

SEQ ID NO: 3465 - RNA, 19 nt, Artificial Sequence
  Synthetic oligonucleotide
auccagugugcccacuaca

SEQ ID NO: 3466 - RNA, 19 nt, Artificial Sequence
  Synthetic oligonucleotide
uccagugugcccacuacau

SEQ ID NO: 3467 - RNA, 19 nt, Artificial Sequence
  Synthetic oligonucleotide
ccagugugcccacuacauu

SEQ ID NO: 3468 - RNA, 19 nt, Artificial Sequence
  Synthetic oligonucleotide
cugaauucaaaaagaucaa

SEQ ID NO: 3469 - RNA, 19 nt, Artificial Sequence
  Synthetic oligonucleotide
ugaauucaaaaagaucaaa

SEQ ID NO: 3470 - RNA, 19 nt, Artificial Sequence
  Synthetic oligonucleotide
gacucuggaucccagaagg

SEQ ID NO: 3471 - RNA, 19 nt, Artificial Sequence
  Synthetic oligonucleotide
acucuggaucccagaaggu

SEQ ID NO: 3472 - RNA, 19 nt, Artificial Sequence
  Synthetic oligonucleotide
cucuggaucccagaaggug

SEQ ID NO: 3473 - RNA, 19 nt, Artificial Sequence
  Synthetic oligonucleotide
ucuggaucccagaagguga

SEQ ID NO: 3474 - RNA, 19 nt, Artificial Sequence
  Synthetic oligonucleotide
cuggaucccagaaggugag

SEQ ID NO: 3475 - RNA, 19 nt, Artificial Sequence
  Synthetic oligonucleotide
uggaucccagaaggugaga

SEQ ID NO: 3476 - RNA, 19 nt, Artificial Sequence
  Synthetic oligonucleotide
ggaucccagaaggugagaa

SEQ ID NO: 3477 - RNA, 19 nt, Artificial Sequence
  Synthetic oligonucleotide
gaucccagaaggugagaaa

SEQ ID NO: 3478 - RNA, 19 nt, Artificial Sequence
  Synthetic oligonucleotide
cgcagcaugucaagaucac

SEQ ID NO: 3479 - RNA, 19 nt, Artificial Sequence
  Synthetic oligonucleotide
gcagcaugucaagaucaca

SEQ ID NO: 3480 - RNA, 19 nt, Artificial Sequence
  Synthetic oligonucleotide
cagcaugucaagaucacag

SEQ ID NO: 3481 - RNA, 19 nt, Artificial Sequence
  Synthetic oligonucleotide
agcaugucaagaucacaga

SEQ ID NO: 3482 - RNA, 19 nt, Artificial Sequence
  Synthetic oligonucleotide
gcaugucaagaucacagau

SEQ ID NO: 3483 - RNA, 19 nt, Artificial Sequence
  Synthetic oligonucleotide
caugucaagaucacagauu

SEQ ID NO: 3484 - RNA, 19 nt, Artificial Sequence
  Synthetic oligonucleotide
augucaagaucacagauuu

SEQ ID NO: 3485 - RNA, 19 nt, Artificial Sequence
  Synthetic oligonucleotide
ugucaagaucacagauuuu

SEQ ID NO: 3486 - RNA, 19 nt, Artificial Sequence
  Synthetic oligonucleotide
gucaagaucacagauuuug

SEQ ID NO: 3487 - RNA, 19 nt, Artificial Sequence
  Synthetic oligonucleotide
ucaagaucacagauuuugg

SEQ ID NO: 3488 - RNA, 19 nt, Artificial Sequence
  Synthetic oligonucleotide
caagaucacagauuuuggg

SEQ ID NO: 3489 - RNA, 19 nt, Artificial Sequence
  Synthetic oligonucleotide
aagaucacagauuuugggc

SEQ ID NO: 3490 - RNA, 19 nt, Artificial Sequence
  Synthetic oligonucleotide
agaucacagauuuugggcu

SEQ ID NO: 3491 - RNA, 19 nt, Artificial Sequence
  Synthetic oligonucleotide
gaucacagauuuugggcug

SEQ ID NO: 3492 - RNA, 19 nt, Artificial Sequence
  Synthetic oligonucleotide
aucacagauuuugggcugg

SEQ ID NO: 3493 - RNA, 19 nt, Artificial Sequence
  Synthetic oligonucleotide
ucacagauuuugggcuggc

SEQ ID NO: 3494 - RNA, 19 nt, Artificial Sequence
  Synthetic oligonucleotide
cacagauuuugggcuggcc

SEQ ID NO: 3495 - RNA, 19 nt, Artificial Sequence
  Synthetic oligonucleotide
acagauuuugggcuggcca

SEQ ID NO: 3496 - RNA, 19 nt, Artificial Sequence
  Synthetic oligonucleotide
cagauuuugggcuggccaa

SEQ ID NO: 3497 - RNA, 19 nt, Artificial Sequence
  Synthetic oligonucleotide
agauuuugggcuggccaaa

SEQ ID NO: 3498 - RNA, 19 nt, Artificial Sequence
  Synthetic oligonucleotide
gauuuugggcuggccaaac

SEQ ID NO: 3499 - RNA, 19 nt, Artificial Sequence
  Synthetic oligonucleotide
auuuugggcuggccaaacu

SEQ ID NO: 3500 - RNA, 19 nt, Artificial Sequence
  Synthetic oligonucleotide
uuuugggcuggccaaacug

SEQ ID NO: 3501 - RNA, 19 nt, Artificial Sequence
  Synthetic oligonucleotide
aggcaaagugccuaucaag

SEQ ID NO: 3502 - RNA, 19 nt, Artificial Sequence
  Synthetic oligonucleotide
ggcaaagugccuaucaagu

SEQ ID NO: 3503 - RNA, 19 nt, Artificial Sequence
  Synthetic oligonucleotide
gcaaagugccuaucaagug

SEQ ID NO: 3504 - RNA, 19 nt, Artificial Sequence
  Synthetic oligonucleotide
caaagugccuaucaagugg

SEQ ID NO: 3505 - RNA, 19 nt, Artificial Sequence
  Synthetic oligonucleotide
aaagugccuaucaagugga

SEQ ID NO: 3506 - RNA, 19 nt, Artificial Sequence
  Synthetic oligonucleotide
aagugccuaucaaguggau

SEQ ID NO: 3507 - RNA, 19 nt, Artificial Sequence
  Synthetic oligonucleotide
agugccuaucaaguggaug

SEQ ID NO: 3508 - RNA, 19 nt, Artificial Sequence
  Synthetic oligonucleotide
guaccaucgaugucuacau

SEQ ID NO: 3509 - RNA, 19 nt, Artificial Sequence
  Synthetic oligonucleotide
uaccaucgaugucuacaug

SEQ ID NO: 3510 - RNA, 19 nt, Artificial Sequence
  Synthetic oligonucleotide
accaucgaugucuacauga

SEQ ID NO: 3511 - RNA, 19 nt, Artificial Sequence
  Synthetic oligonucleotide
ccaucgaugucuacaugau

SEQ ID NO: 3512 - RNA, 19 nt, Artificial Sequence
  Synthetic oligonucleotide
caucgaugucuacaugauc

SEQ ID NO: 3513 - RNA, 19 nt, Artificial Sequence
  Synthetic oligonucleotide
aucgaugucuacaugauca

SEQ ID NO: 3514 - RNA, 19 nt, Artificial Sequence
  Synthetic oligonucleotide
ucgaugucuacaugaucau

SEQ ID NO: 3515 - RNA, 19 nt, Artificial Sequence
  Synthetic oligonucleotide
cgaugucuacaugaucaug

SEQ ID NO: 3516 - RNA, 19 nt, Artificial Sequence
  Synthetic oligonucleotide
gaugucuacaugaucaugg

SEQ ID NO: 3517 - RNA, 19 nt, Artificial Sequence
  Synthetic oligonucleotide
augucuacaugaucauggu

SEQ ID NO: 3518 - RNA, 19 nt, Artificial Sequence
  Synthetic oligonucleotide
ugucuacaugaucaugguc

SEQ ID NO: 3519 - RNA, 19 nt, Artificial Sequence
  Synthetic oligonucleotide
gucuacaugaucaugguca

SEQ ID NO: 3520 - RNA, 19 nt, Artificial Sequence
  Synthetic oligonucleotide
ucuacaugaucauggucaa

SEQ ID NO: 3521 - RNA, 19 nt, Artificial Sequence
  Synthetic oligonucleotide
cuacaugaucauggucaag

SEQ ID NO: 3522 - RNA, 19 nt, Artificial Sequence
  Synthetic oligonucleotide
uacaugaucauggucaagu

SEQ ID NO: 3523 - RNA, 19 nt, Artificial Sequence
  Synthetic oligonucleotide
acaugaucauggucaagug

SEQ ID NO: 3524 - RNA, 19 nt, Artificial Sequence
  Synthetic oligonucleotide
caugaucauggucaagugc

SEQ ID NO: 3525 - RNA, 19 nt, Artificial Sequence
  Synthetic oligonucleotide
augaucauggucaagugcu

SEQ ID NO: 3526 - RNA, 19 nt, Artificial Sequence
  Synthetic oligonucleotide
ugaucauggucaagugcug

SEQ ID NO: 3527 - RNA, 19 nt, Artificial Sequence
  Synthetic oligonucleotide
gaucauggucaagugcugg

SEQ ID NO: 3528 - RNA, 19 nt, Artificial Sequence
  Synthetic oligonucleotide
aucauggucaagugcugga

SEQ ID NO: 3529 - RNA, 19 nt, Artificial Sequence
  Synthetic oligonucleotide
ucauggucaagugcuggau

SEQ ID NO: 3530 - RNA, 19 nt, Artificial Sequence
  Synthetic oligonucleotide
cauggucaagugcuggaug

SEQ ID NO: 3531 - RNA, 19 nt, Artificial Sequence
  Synthetic oligonucleotide
auggucaagugcuggauga

SEQ ID NO: 3532 - RNA, 19 nt, Artificial Sequence
  Synthetic oligonucleotide
uggucaagugcuggaugau

SEQ ID NO: 3533 - RNA, 19 nt, Artificial Sequence
  Synthetic oligonucleotide
ggucaagugcuggaugaua

SEQ ID NO: 3534 - RNA, 19 nt, Artificial Sequence
  Synthetic oligonucleotide
ucgaauucuccaaaauggc

SEQ ID NO: 3535 - RNA, 19 nt, Artificial Sequence
  Synthetic oligonucleotide
cgaauucuccaaaauggcc

SEQ ID NO: 3536 - RNA, 19 nt, Artificial Sequence
  Synthetic oligonucleotide
gggaugaaagaaugcauuu

SEQ ID NO: 3537 - RNA, 19 nt, Artificial Sequence
  Synthetic oligonucleotide
ggaugaaagaaugcauuug

SEQ ID NO: 3538 - RNA, 19 nt, Artificial Sequence
  Synthetic oligonucleotide
gaugaaagaaugcauuugc

SEQ ID NO: 3539 - RNA, 19 nt, Artificial Sequence
  Synthetic oligonucleotide
augaaagaaugcauuugcc

SEQ ID NO: 3540 - RNA, 19 nt, Artificial Sequence
  Synthetic oligonucleotide
ugaaagaaugcauuugcca

SEQ ID NO: 3541 - RNA, 19 nt, Artificial Sequence
  Synthetic oligonucleotide
uggacaacccugacuacca

SEQ ID NO: 3542 - RNA, 19 nt, Artificial Sequence
  Synthetic oligonucleotide
ggacaacccugacuaccag

SEQ ID NO: 3543 - RNA, 19 nt, Artificial Sequence
  Synthetic oligonucleotide
gacaacccugacuaccagc

SEQ ID NO: 3544 - RNA, 19 nt, Artificial Sequence
  Synthetic oligonucleotide
acaacccugacuaccagca

SEQ ID NO: 3545 - RNA, 19 nt, Artificial Sequence
  Synthetic oligonucleotide
caacccugacuaccagcag

SEQ ID NO: 3546 - RNA, 19 nt, Artificial Sequence
  Synthetic oligonucleotide
aacccugacuaccagcagg

SEQ ID NO: 3547 - RNA, 19 nt, Artificial Sequence
  Synthetic oligonucleotide
acccugacuaccagcagga

SEQ ID NO: 3548 - RNA, 19 nt, Artificial Sequence
  Synthetic oligonucleotide
cccugacuaccagcaggac
